(19) United States
(12) Patent Application Publication
(10) Pub. No.: US 2020/0109382 A1
(43) Pub. Date: Apr. 9, 2020

(54) NOVEL MUTATIONS THAT ENHANCE THE DNA CLEAVAGE ACTIVITY OF ACIDAMINOCOCCUS SP. CPF1

(71) Applicant: Integrated DNA Technologies, Inc., Coralville, IA (US)

(72) Inventors: Liyang Zhang, Coralville, IA (US); Christopher Anthony Vakulskas, North Liberty, IA (US); Nicole Mary Bode, Oxford, IA (US); Michael Allen Collingwood, North Liberty, IA (US); Kristin Renee Beltz, Cedar Rapids, IA (US); Mark Aaron Behlke, Coralville, IA (US)

(21) Appl. No.: 16/536,256

(22) Filed: Aug. 8, 2019

Related U.S. Application Data
(60) Provisional application No. 62/870,268, filed on Jul. 3, 2019.
(60) Provisional application No. 62/749,607, filed on Oct. 23, 2018.
(60) Provisional application No. 62/716,138, filed on Aug. 8, 2018.

(51) Int. Cl. C12N 9/22; C12N 15/11

(52) U.S. Cl. CPC C12N 9/22; C12N 2800/80; C12N 2310/20; C12N 15/11

(57) ABSTRACT

The present disclosure concerns polynucleotides and amino acids of Acidaminococcus sp. Cas12a (Cpf1) and methods for their use for genome editing in eukaryotic cells.

### CROSS-REFERENCE TO RELATED APPLICATIONS

[0001] This application claims benefit of priority under 35 U.S.C. 119 to U.S. Provisional Patent Application Ser. No. 62/870,268, filed Jul. 3, 2019 and entitled “OPTIMIZED CAS12A (CPF1) PROTEINS FOR EFFICIENT GENOME EDITING IN EUKARYOTIC CELLS,” U.S. Provisional Patent Application Ser. No. 62/749,607, filed Oct. 23, 2018 and entitled “DEEP-SCANNING MUTAGENESIS UNCOVERS NOVEL MUTATIONS THAT ENHANCE THE DNA CLEAVAGE ACTIVITY OF ACIDAMINOCOCCUS SP. CAS12A/CAS12A AT NON-CANONICAL TTTT PAM SITES” and U.S. Provisional Patent Application Ser. No. 62/716,138, filed Aug. 8, 2018 and entitled “NOVEL MUTATIONS THAT ENHANCE THE DNA CLEAVAGE ACTIVITY OF ACIDAMINOCOCCUS SP. CPF1,” the contents of each application are herein incorporated by reference in its entirety.

### FIELD OF THE INVENTION

[0002] This invention pertains to the ability to cleave double-stranded DNA of living organisms at precise positions with the CRISPR/Cas12a (Cpf1) nuclease system. In particular, a series of recombinant Cas12a proteins are described that are useful in a eukaryotic cell context.

### SEQUENCE LISTING

[0003] The instant application contains a Sequence Listing that has been submitted in ASCII format via EFS-Web and is hereby incorporated by reference in its entirety. The ASCII copy, created on ______, is named ______, and is ______ bytes in size.

### BACKGROUND OF THE INVENTION

[0004] Cas12a is an RNA-guided endonuclease found in bacterial species including Acidaminococcus sp. and is part of the Clustered Regularly Interspaced Short Palindromic Repeat (CRISPR) adaptive immune system. Cas12a is guided to a 21˜24-nt DNA target sequence, or commonly referred as protospacer, by a target site-specific 21˜24-nt complementary RNA. The Cas12a-gRNA ribonucleoprotein (RNP) complex mediates double-stranded DNA breaks (DSBs), which are then repaired by either the non-homologous end joining (NHEJ, typically introduces mutations or indels at the cut site), or the homology directed repair (HDR) system for precise editing if a suitable template nucleic acid is present.

[0005] Critical to the recognition of correct DNA target for Cas12a includes both crRNA and the canonical “TTTV” protospacer adjacent motif (PAM), which is a 4-bp sequence immediately upstream of the protospacer. Compared to the 2-bp NGG PAM of Cas9 from Streptococcus pyogenes, Cas12a expanded the targetable loci in genome editing, particularly over the AT-rich sites that are inaccessible to the Cas9 system. However, due to its relatively low enzymatic activity, the likelihood that efficient genome editing can be achieved for a given site is much lower than that of the Cas9 system, which restricts its broader application. As the consequence, the Cas12a system is frequently considered as an alternative approach only when the genomic site is not targetable by Cas9.

[0006] Protein engineering by mutagenesis can alter the preference of PAM sequence of CRISPR system. Through a structural-guided mutagenic screening of residues in proximity of PAM sequence, previous study has identified two AsCpf1 variants that are compatible with TYCV and TATV PAMs, respectively. Although these variants collectively expanded the targetable sites of Cpf1 system over the coding region of the human genome by 3-fold, the utility of each individual variant is still limited, due to their mutually exclusive requirement of PAM sequences (TYCV vs TATV vs TTTV). Identifying Cpf1 variants with shorter PAM and greater sequence flexibility without sacrificing the activity at canonical PAM sites is highly desirable.

[0007] Thus, there is a need to enhance the utility of Cas12a. One aspect of the present application is to enhance the utility of Cpf1 by broadening its PAM compatibility. In this regard, certain novel AsCas12a variants with enhanced activity have been discovered. Another desired objective is to maximize delivery of the bacterial protein to the eukaryotic nucleus while simultaneously avoiding disruption of basic Cas12a function. Since the Cas12a is a bacterial protein, certain molecular genetic obstacles must first be overcome before one can achieve successful delivery of the protein to eukaryotic cells. This invention provides unique solutions to achieving these objectives.

### BRIEF SUMMARY OF THE INVENTION

[0008] In a first aspect, A CRISPR-associated protein comprising a polypeptide encoding a variant of AsCpf1 is provided. The variant of AsCpf1 is selected from the group consisting of M537R (SEQ ID NO.: 472), F870L (SEQ ID NO.: 473), and M537R/F870L (SEQ ID NO.: 465).

[0009] In a second aspect, a CRISPR ribonucleoprotein complex is provided. The CRISPR ribonucleoprotein complex includes a guide RNA and a CRISPR-associated protein. The CRISPR-associated protein including a polypeptide encoding a variant of AsCpf1. The variant of AsCpf1 is selected from the group consisting of M537R (SEQ ID NO.: 472), F870L (SEQ ID NO.: 473), and M537R/F870L (SEQ ID NO.: 465).

[0010] In a third aspect, a method of increasing efficiency of gene editing at TTTN PAM sites in a cell with a CRISPR ribonucleoprotein complex is provided. The method includes the step of contacting a cell with the CRISPR ribonucleoprotein complex. The CRISPR ribonucleoprotein complex includes a guide RNA and a CRISPR-associated protein. The CRISPR-associated protein including a polypeptide encoding a variant of AsCpf1. The variant of AsCpf1 is selected from the group consisting of M537R (SEQ ID NO.: 472), F870L (SEQ ID NO.: 473), and M537R/F870L (SEQ ID NO.: 465).

[0011] In a fourth aspect, a kit comprising a guide RNA and a CRISPR-associated protein is provided. The CRISPR-associated protein includes a polypeptide encoding a variant of AsCpf1.

[0012] In a fifth aspect, CRISPR-associated protein comprising a polypeptide encoding a variant of AsCas12a, wherein the variant of AsCas12a is selected from the group consisting of at least one variant amino acid selected from amino acid positions 499-640 and 840-913, provided that the variant AsCas12a provides an improvement in CRISPR/AsCas12a-associated nuclease activity at non-canonical TTTT PAM sites.

[0013] In a sixth aspect, a CRISPR ribonucleoprotein complex is provided. The CRISPR ribonucleoprotein complex includes a guide RNA and a CRISPR-associated protein. The CRISPR-associated protein includes a polypeptide encoding a variant of AsCas12a, wherein the variant of AsCas12a is selected from the group consisting of at least one variant amino acid selected from amino acid positions 499-640 and 840-913, provided that the variant AsCas12a provides an improvement in CRISPR/AsCas12a-associated nuclease activity at non-canonical TTTT PAM sites.

[0014] In a seventh aspect, a method of increasing efficiency of gene editing at non-canonical TTTT PAM sites in a cell with a CRISPR ribonucleoprotein complex is provided. The method includes a step of contacting a cell with the CRISPR ribonucleoprotein complex that includes a guide RNA and a CRISPR-associated protein. The CRISPR-associated protein includes a polypeptide encoding a variant of AsCas12a, wherein the variant of AsCas12a is selected from the group consisting of at least one variant amino acid selected from amino acid positions 499-640 and 840-913, provided that the variant AsCas12a provides an improvement in CRISPR/AsCas12a-associated nuclease activity at non-canonical TTTT PAM sites.

[0015] In an eighth aspect, a kit including a guide RNA and a CRISPR-associated protein comprising a polypeptide encoding a variant of AsCas12a is provided. The variant of AsCas12a is selected from the group consisting of at least one variant amino acid selected from amino acid positions 499-640 and 840-913, provided that the variant AsCas12a provides an improvement in CRISPR/AsCas12a-associated nuclease activity at non-canonical TTTT PAM sites.

[0016] In a ninth aspect, a nucleic acid encoding a CRISPR-associated protein comprising a polypeptide encoding a variant of AsCas12a is provided. The variant of AsCas12a is selected from the group consisting of at least one variant amino acid selected from amino acid positions 499-640 and 840-913, provided that the variant AsCas12a provides an improvement in CRISPR/AsCas12a-associated nuclease activity at non-canonical TTTT PAM sites.

[0017] In a tenth aspect, a polynucleotide sequence encoding a Cas12a polypeptide is provided. The polynucleotide sequence includes one member selected from the group consisting of SEQ ID NOs.: 5-17.

[0018] In an eleventh aspect, an amino acid sequence encoding a Cas12a polypeptide is provided. The amino acid sequence includes one member selected from the group consisting of SEQ ID NOs.: 18-30.

[0019] In a twelfth aspect, a CAS endonuclease system comprising an expression cassette encoding a polynucleotide sequence encoding a Cas12a polypeptide is provided. The includes one member selected from the group consisting of SEQ ID NOs.: 5-17.

[0020] In a thirteenth aspect, CAS endonuclease system comprising an amino acid sequence encoding a Cas12a polypeptide is provided The amino acid sequence includes one member selected from the group consisting of SEQ ID NOs.: 18-30.

[0021] In a fourteenth aspect, a method of performing genome editing in a eukaryotic cells is provided. The method includes the step of introducing an CAS endonuclease system into the eukaryotic cell, said CAS endonuclease system comprising an expression cassette encoding a polynucleotide sequence encoding a Cas12a polypeptide, comprising one member selected from the group consisting of SEQ ID NOs.: 5-17.

[0022] In a fifteenth aspect, a method of performing genome editing in a eukaryotic cell is provided. The method includes the step of introducing an CAS endonuclease system into the eukaryotic cell, said CAS endonuclease system comprising an amino acid sequence encoding a Cas12a polypeptide comprising one member selected from the group consisting of SEQ ID NOs.: 18-30.

[0023] In a sixteenth aspect, an CRISPR-associated protein comprising a fusion polypeptide is provided. The fusion polypeptide includes an AsCas12a open reading frame, a nuclear localization signal, optionally an amino acid linker and optionally an affinity tag.

[0024] In a seventeenth aspect, a method of performing genome editing in a eukaryotic cell is provided. The method includes the step of introducing an CAS endonuclease system into the eukaryotic cell, said CAS endonuclease system comprising a CRISPR-associated protein of according to the sixteenth aspect.

### BRIEF DESCRIPTION OF THE DRAWINGS

[0025] FIG. 1 depicts multiple recombinant forms of Cas12a yields a spectrum of editing efficiencies. A series of recombinant Cas12a proteins with differing composition and arrangement of NLS sequences, purification tags, and linkers (A-M; corresponding to SEQ ID NOs.:18-30) were cloned and purified to homogeneity. The resulting purified Cas12a derivatives were delivered into HEK293 cells by electroporation complexed to RNA guides that target the HPRT-38186 (SEQ ID NO.:1) and HPRT-38228 loci (SEQ ID NO.:2). DNA was isolated from genome editing experiments 48 hr later, and editing efficiencies were determined by PCR amplification of edited loci using HPRT-FWD (SEQ ID NO.:3) and HPRT-REV (SEQ ID NO.:4) primers and the Alt-R Genome Editing Detection Kit (Integrated DNA Technologies). The following abbreviations apply for the illustrated constructs: V5 refers to V5 epitope tag (SEQ ID NO.: 485); SV40 refers to a nuclear localization signal from simian virus SV40 large tumor antigen (SEQ ID NO.: 475); Cas12a refers to a Cas12a coding sequence; HIS refers to a hexahistidine tag (SEQ ID NO.: 487); OpT refers to an optimized nuclear localization signal (SEQ ID NO.: 477); aNLS refers to an alternative nuclear localization signal(SEQ ID NO.: 479); BIP1 refers to a first bipartite nuclear localization signal (SEQ ID NO.: 481); and BIP2 refers to a second bipartite nuclear localization signal (SEQ ID NO.: 483). The arrows provided in the constructs depict transcriptional start sites for mRNA transcripts originating from the DNA.

[0026] FIG. 2 shows exemplary results of M537R and F870L mutations with enhanced the cleavage activity of Cpf1 in a bacterial-based activity assay. The screening E. coli strains were transformed with Cpf1 expression vectors and the crRNA targeting HPRT-38346 site on the toxin expression plasmid. The apparent activity of Cpf1 for TTTT or TTTC PAM can be estimated by the number of survived colonies under arabinose selection when equivalent amount of plasmids is delivered. Clearly, both mutations increased the survival rate at TTTC and TTTT PAM sites, indicating an improved cleavage activity over the WT-Cpf1.

[0027] FIG. 3A shows an exemplary SDS-PAGE analysis of AsCpf1 variants used in the in vitro cleavage assay and subsequent genome editing in human cell lines. Indicated quantity of protein was loaded, and no difference was observed comparing to the WT-Cpf1. These results demonstrate M537R and F870L mutations can increase the in vitro cleavage activity of Cpf1 at non-conical TTTT PAM site while maintaining high activity at canonical TTTV site.

[0028] FIG. 3B shows exemplary DNA cleavage activities of Cpf1 variants at HPRT-38346 site with TTTC or TTTT PAM. Both variants resulted in a higher percentage of DNA cleavage at TTTT PAM site than WT-Cpf1. These results demonstrate M537R and F870L mutations can increase the in vitro cleavage activity of Cpf1 at non-conical TTTT PAM site while maintaining high activity at canonical TTTV site.

[0029] FIG. 4 shows a summary of results showing exemplary results of M537R and F870L mutations having broadly enhanced the genomic targeting efficiency of AsCpf1 at TTTN PAM sites in human cell line. The genomic targeting efficiencies of Cpf1 variants were tested in a human cell line model using T7 endonuclease I assay (T7EI). Twenty-four crRNAs targeting the CTNNB1 gene with TTTN PAMs were synthesized, assembled with Cpf1 variants as RNP complex, and delivered by nucleofection (Lonza). The genomic DNA was collected 48 hours post-delivery to assess the formation of indels by T7EI. Not only enabled DNA cleavage at all TTTT PAM sites that many were not targetable by WT-Cpf1, the reported variants, particularly the double-mutant (M537R/F870L), broadly enhanced the targeting efficiency of Cpf1 at 22 of 24 tested sites regardless of PAM sequence.

[0030] FIG. 5A shows exemplary correlation of relative survival rate of M537R/F870L-AsCas12a under condition 1 (X-axis) vs. relative survival rate of M537R/F870L-AsCas12a condition 2 (Y-axis). Consistent phenotype measurement was obtained (ρ˜0.7).

[0031] FIG. 5B shows exemplary correlation of relative survival rate of M537R/F870L-AsCas12a under condition 1 (X-axis) vs. relative survival rate of WT-AsCas12a under condition 3 (Y-axis). Consistent phenotype measurement was obtained (ρ˜0.7).

[0032] FIG. 5C shows exemplary correlation of relative survival rate of M537R/F870L-AsCas12a under condition 2 (X-axis) vs. relative survival rate of WT-AsCas12a under condition 2 (Y-axis). Consistent phenotype measurement was obtained (ρ˜0.7).

[0033] FIG. 5D shows exemplary variant scores of phenotype (relative survival rate) of single point mutations of a selected number of AsCas12a at positions 537 and 870 under conditions 1 and 2.

[0034] FIG. 5E shows exemplary variant scores of phenotype (relative survival rate) of single point mutations of a selected number of AsCas12a at positions 537 and 870 under conditions 1 and 2. FIGS. 5D and 5E show that M537R and F870L are the optimal substitutions at respective positions, which is consistent with the result of our previous screening and mutant characterization.

[0035] FIG. 5F shows exemplary variant scores of phenotype (relative survival rate) of single point mutations of a selected number of AsCas12a at positions 505, 510, 569 and 599 under conditions 1, 2 and 3.

[0036] FIG. 6A shows survival rate of E. coli resulting from DNA cleavage activity of WT-AsCas12a at TTTT PAM. The cleavage activity of AsCas12a variants at TTTT PAM site was measured by bacterial-based activity assay. The petri dish plated with the initial bacterial plating is shown on the left, while the petri dish having the surviving bacterial colonies is shown on the right. The survival of E. coli under selection is dependent on the success cleavage of a toxin-expressing plasmid containing a TTTT PAM site.

[0037] FIG. 6B shows survival rate of E. coli resulting from DNA cleavage activity of L505K-AsCas12a variant at TTTT PAM. The presentation of petri dishes and experimental details are as set forth in FIG. 6A.

[0038] FIG. 6C shows survival rate of E. coli resulting from DNA cleavage activity of S510L-AsCas12a variant at TTTT PAM. The presentation of petri dishes and experimental details are as set forth in FIG. 6A.

[0039] FIG. 6D shows survival rate of E. coli resulting from DNA cleavage activity of M537R-AsCas12a variant at TTTT PAM. The presentation of petri dishes and experimental details are as set forth in FIG. 6A.

[0040] FIG. 6E shows survival rate of E. coli resulting from DNA cleavage activity of P569D-AsCas12a variant at TTTT PAM. The presentation of petri dishes and experimental details are as set forth in FIG. 6A.

[0041] FIG. 6F shows survival rate of E. coli resulting from DNA cleavage activity of P599G-AsCas12a variant at TTTT PAM. The presentation of petri dishes and experimental details are as set forth in FIG. 6A.

[0042] FIG. 7A shows survival rate of E. coli resulting from DNA cleavage activity of M537R/F870L-AsCas12a at TTTT PAM. The cleavage activity of M537R/F870L-AsCas12a variants at TTTT PAM site was measured by bacterial-based activity assay. The petri dish plated with the initial bacterial plating is shown on the left, while the petri dish having the surviving bacterial colonies is shown on the right. The survival of E. coli under selection is dependent on the success cleavage of a toxin-expressing plasmid containing a TTTT PAM site.

[0043] FIG. 7B shows survival rate of E. coli resulting from DNA cleavage activity of L505K/M537R/F870L-AsCas12a variant at TTTT PAM. The presentation of petri dishes and experimental details are as set forth in FIG. 7A.

[0044] FIG. 7C shows survival rate of E. coli resulting from DNA cleavage activity of M537R/F870L-AsCas12a variant at TTTT PAM. The presentation of petri dishes and experimental details are as set forth in FIG. 7A.

[0045] FIG. 7D shows survival rate of E. coli resulting from DNA cleavage activity of P569D/M537R/F870L-AsCas12a variant at TTTT PAM. The presentation of petri dishes and experimental details are as set forth in FIG. 7A.

[0046] FIG. 7E shows survival rate of E. coli resulting from DNA cleavage activity of P599G/M537R/F870L-AsCas12a variant at TTTT PAM. The presentation of petri dishes and experimental details are as set forth in FIG. 7A.

[0047] FIG. 7F shows survival rate of E. coli resulting from DNA cleavage activity of S510L/M537R/F870L-AsCas12a variant at TTTT PAM. The presentation of petri dishes and experimental details are as set forth in FIG. 7A.

### DETAILED DESCRIPTION

[0048] The present invention concerns compositions of Cas12a variants and methods to enhance the utility of Cas12a and variants thereof for expression in eukaryotic cells.

### Definitions

[0049] When introducing elements of aspects of the disclosure or particular embodiments, the articles “a,” “an,” “the,” and “said” are intended to mean that there are one or more of the elements. The terms “comprising,” “including,” and “having” are intended to be inclusive and mean that there may be additional elements other than the listed elements. The term “or” means any one member of a particular list and also includes any combination of members of that list, unless otherwise specified.

[0050] As intended herein, the terms “substantially,” “approximately,” and “about” and similar terms are intended to have a broad meaning in harmony with the common and accepted usage in the art to which the subject matter of this disclosure pertains. It should be understood by those of skill in the art who review this disclosure that these terms are intended to allow a description of certain features described and claimed without restricting the scope of these features to precise numerical ranges provided. Accordingly, these terms should be interpreted as indicating that insubstantial or inconsequential modifications or alterations of the subject matter described and claimed are considered to be within the scope of the invention as recited in the appended claims.

[0051] Definitions pertaining to certain terms and phrases applicable herein may be found in related US patents and publications, such as U.S. patent application Ser. Nos. 14/975,709, 15/299,549, 15/299,590, 15/299,593, 15/881,684, 15/729,491, 15/821,736, 15/964,041, 15/839,817, 15/839,820, 62/716,138, and U.S. Pat. No. 9,840,702.

[0052] The term “substantially purified,” as applied to a composition, refers to a composition having at least 90% purity or greater, including 90% purity, 95% purity, 99% purity and greater than 99% purity.

[0053] The adjective “isolated,” when modifying a composition, such as a polynucleotide, a polypeptide or a ribonucleoprotein complex refers to a substantially purified composition, or in the case of a ribonucleoprotein complex, at least one component being a substantially purified component. In further respect to an isolated ribonucleoprotein complex, preferably all components are substantially purified.

[0054] The terms “nucleic acid” and “polynucleotide” are interchangeable have the same meaning.

[0055] The terms “amino acid sequence,” “polypeptide,” and “protein” are interchangeable have the same meaning.

[0056] The term “affinity tag” refers to a ligand that permits detection and/or selection of an oligonucleotide sequence to which the ligand is attached. For the purposes of this disclosure, a bait may include an affinity tag. In particular, the affinity tag is positioned typically at either or both the N′-terminus and/or C′-terminus of a polypeptide through the use of conventional chemical coupling technology or recombinant DNA technology. Exemplary affinity tags include biotin, digoxigenin, streptavidin, polyhistine (for example, (His₆),), glutathione-S-transferase (GST), HaloTag®, AviTag, Calmodulin-tag, polyglutamate tag, FLAG-tag, HA-tag, Myc-tag, S-tag, SBP-tag, Softag 3, V5 tag, Xpress tag, a hapten, among others.

[0057] The term “eukaryotic cell,” includes those cells of or derived from a particular organism, such as a plant or a mammal, including but not limited to human, or non-human eukaryote or animal or mammal as herein discussed, e.g., mouse, rat, rabbit, dog, livestock, or non-human mammal or primate. In some embodiments, processes for modifying the germ line genetic identity of human beings and/or processes for modifying the genetic identity of animals which are likely to cause them suffering without any substantial medical benefit to man or animal, and also animals resulting from such processes, may be excluded. Preferred human cells include cells derived from somatic cells and germ line cells. Exemplary somatic cells include cells from every major organ and tissue system, including the immune system and hematopoietic system.

[0058] As set forth herein, the Conditions 1, 2 and 3 refer to different combinations of background strain and the amounts of gRNA introduced in the background strain before selection of the variants. Condition 1 is a M537R/F870L background that includes an introduced amount of gRNA (100 pmol per 10 microliter transformation/plating experiment) in which variants were selected. Condition 2 is a M537R/F870L background that includes an introduced amount of gRNA (50 pmol per 10 microliter transformation/plating experiment) in which variants were selected. Condition 3 is a Wild-type AsCpf1 background that includes an introduced amount of gRNA (200 pmol per 10 microliter transformation/plating experiment) in which variants were selected.

### Cas12a Polypeptides Having Eukaryotic Nuclear Localization Signals

[0059] Since Cas12a is a bacterial protein, it has no native targeting mechanism to reach the eukaryotic nucleus, where the target DNA resides.

[0060] To more efficiently target proteins to the eukaryotic nucleus, short protein sequences called nuclear localization signals (NLS) are commonly added to the amino- or carboxy-terminal ends of a given open reading frame. NLSs are recognized by import proteins on the eukaryotic nuclear envelope that first bind to the nuclear membrane, and subsequently permit pore translocation into the nucleus by an energy-dependent process. While recombinant protein tags like an NLS can greatly improve localization, any addition of exogenous amino acid sequences stands a reasonable chance of perturbing protein function. As such, discovering a recombinant Cas12a protein sequence that facilitates the highest amount of nuclear delivery without negatively affecting its activity will ultimately result in the most potent Cas12a genome editing solution, which is non-trivial and highly desirable.

[0061] To improve nuclear delivery of Cas12a without perturbing its function, several different recombinant versions of Cas12a were constructed in which the identity, location, and number of protein tags (NLS, hexahistidine tag (an exemplary affinity tag)) were varied. Whereas hexahistidine and V5 tags were added to Cas12a constructs to aid in protein purification and/or detection, the NLS tags were added to assist in delivery to the eukaryotic nucleus. Domain-breaking linker sequences were also varied in composition and location to empirically determine the best arrangement and context of tagged sequences. All constructs were first expressed in E. coli, and recombinant Cas12a proteins were purified with immobilized metal affinity chromatography (IMAC) followed by ion exchange chromatography as described previously.

### AsCpf1 Polypeptide Variants Having Novel Cleavage Activities

[0062] Amino acid substitutions in AsCpf1 that enhance the cleavage activity at both canonical (TTTV) and non-canonical (TTTT) PAM sites using a bacterial screening approach are described. This screen contained two components: i) a toxin plasmid encoding an arabinose-inducible cell proliferation toxin and a CRISPR/Cpf1 on-target cleavage site (HPRT-38346) with TTTT PAM, and ii) a chloramphenicol resistance plasmid containing a randomly-mutagenized region within the AsCpf1 sequence (˜5 mutations per kb). The screen was performed as follows: E. coli BW25141(XDE3) was transformed with the toxin plasmid containing the HPRT-38346 target site in the absence of arabinose, where the toxin is not produced and cell survival is permitted. Cells with stably replicating toxin plasmid are then transformed with the AsCpf1 expression plasmid and crRNA targeting HPRT-38346, and then cells were plated on media containing both chloramphenicol and arabinose. Bacteria that grew were those that i) successfully transformed with the AsCpf1 expression plasmid, ii) expressed sufficient AsCpf1 variant to cleave the toxin plasmid at HPRT-38346 site using TTTT PAM. The AsCpf1 expression plasmids within the survived cells were recovered and used in the subsequent round of selection. After multiple rounds of selection, the identities of enriched AsCpf1 variants were determined by DNA sequencing, and carried forward for analysis in mammalian cells.

[0063] The disclosure provides following two novel point mutations and the combination in the AsCpf1 gene that enhances the cleavage activity: M537R and F870L. The cleavage activity of individual mutant was first tested in a bacterial-based activity assay. Next, purified proteins were further tested in vitro and in human cell lines. In summary, both substitutions significantly enhanced the DNA cleavage activity of Cpf1 at TTTT PAM sites in all assays. Further, the combination of M537R and F870L broadly enhanced the targeting efficiency of AsCpf1 in human cell line. Overall, the present invention identifies novel amino-acid positions in the AsCpf1 gene that can be mutated to improve its cleavage activity at all TTTN (N=A/G/C/T) PAM sites.

[0064] As explained in the Background section, the prior art consists of using wild-type Cpf1 protein or two variants that are compatible with TYCV and TATV PAMs. As stated previously, these variants have limited utility due to the complex and mutually exclusive requirement of PAM sequence. Further, none of the variants showed any improved cleavage activity at TTTT PAM, which is unfortunately more frequent than other TTTV PAM sites (V=G/A/C) throughout the human genome. In contrast, not only enabling efficient cleavage at TTTT PAM, the mutations reported in this invention (M537R and F870L) broadly enhanced the cleavage activity of Cpf1 at canonical TTTV sites tested in human cell line. Together, the enhanced activity and broadened PAM flexibility (TTTN) of this invention makes it a superior CRISPR enzyme, which could directly replace the current wild-type Cpf1 in the application genomic editing.

### High-Throughput Generation of AsCas12a Variants Having Cleavage Activity Towards a TTTT PAM-Containing Target Site.

[0065] The phenotype of all point mutations in the following regions of AsCas12a: 499-640 and 840-913 in the bacterial screening measuring the DNA cleavage activity at non-canonical TTTT PAM is described. Three sets of screening were performed to measure the phenotype of each point mutation, in the background of both WT-AsCas12a and M537R/F870L-AsCas12a. Cross-comparison of three datasets revealed consistent phenotype measurements, which enabled us to isolate novel AsCas12a variants with enhanced activity beyond M537R and F870L.

[0066] The high-throughput characterization of Cas12a activity at a TTTT PAM site provided the functional consequence of every possible single amino acid change within targeted region. The unbiased strategy of the present invention enables one to identify a large collection of mutants to further enhance the cleavage activity of AsCas12a over our previous invention (M537R/F870L).

[0067] To improve the coverage and efficiency of the screening, we generated an AsCas12a deep-scanning mutagenesis library containing all possible point mutations on the protein level in the targeted regions (490-640 and 840-913), with most clones contain only one mutation. This type of library allowed us to directly evaluate the phenotype of each point mutation, by measuring their relative survival rates over the reference protein in the bacterial screen. Briefly, the screening strain harboring the toxin plasmid was transformed with AsCas12a library with TTTT PAM-containing target site on the toxin plasmid. After transformation, cells were plated on selective media. AsCas12a expression plasmids carried by the survived E. coli cells were extracted and purified. Both input and selected plasmid libraries were PCR amplified, and sequenced on Illumina MiSeq with 1˜2 million reads per library. The frequencies of each AsCas12a variant in both libraries were determined using Enrich 2, and normalized to the reference protein (WT or M537R/F870L). The relative survival rate of each point mutation over reference was calculated as the ratio of normalized frequency between selected and input library. Since the degree of cell survival is indicative of the DNA cleavage activity of each AsCas12a variant, any variants with higher survival rate than the reference protein would be those with enhanced activity at TTTT PAM.

[0068] As presented herein, codon-optimized Cas12a polypeptides are provided, including codon-optimized Cas12a polypeptides for CRISPR ribonucleoprotein complexes. An example of a codon-optimized sequence, is in this instance a sequence optimized for expression in eukaryotes, e.g., humans (i.e., being optimized for expression in humans), or for another eukaryote, animal or mammal as herein discussed. Whilst this is preferred, it will be appreciated that other examples are possible and codon optimization for a host species other than human, or for codon optimization for specific organs is known. In some embodiments, an enzyme coding sequence encoding a CRISPR Cas12a polypeptide is a codon optimized for expression in particular cells, such as eukaryotic cells. The eukaryotic cells may be those of or derived from a particular organism, such as a plant or a mammal, including but not limited to human, or non-human eukaryote or animal or mammal as herein discussed, e.g., mouse, rat, rabbit, dog, livestock, or non-human mammal or primate. In some embodiments, processes for modifying the germ line genetic identity of human beings and/or processes for modifying the genetic identity of animals which are likely to cause them suffering without any substantial medical benefit to man or animal, and also animals resulting from such processes, may be excluded.

[0069] Preferred human cells include cells derived from somatic cells and germ line cells. Exemplary somatic cells include cells from every major organ and tissue system, including the immune system and hematopoietic system.

[0070] In general, codon optimization refers to a process of modifying a nucleic acid sequence for enhanced expression in the host cells of interest by replacing at least one codon (e.g. about or more than about 1, 2, 3, 4, 5, 10, 15, 20, 25, 50, or more codons) of the native sequence with codons that are more frequently or most frequently used in the genes of that host cell while maintaining the native amino acid sequence. Various species exhibit particular bias for certain codons of a particular amino acid. Codon bias (differences in codon usage between organisms) often correlates with the efficiency of translation of messenger RNA (mRNA), which is in turn believed to be dependent on, among other things, the properties of the codons being translated and the availability of particular transfer RNA (tRNA) molecules. The predominance of selected tRNAs in a cell is generally a reflection of the codons used most frequently in peptide synthesis. Accordingly, genes can be tailored for optimal gene expression in a given organism based on codon optimization. Codon usage tables are readily available. See Nakamura, Y., et al. “Codon usage tabulated from the international DNA sequence databases: status for the year 2000” Nucl. Acids Res. 28:292 (2000). Computer algorithms for codon optimizing a particular sequence for expression in a particular host cell are also available, such as Gene Forge (Aptagen; Jacobus, Pa.), are also available. In some embodiments, one or more codons (e.g. 1, 2, 3, 4, 5, 10, 15, 20, 25, 50, or more, or all codons) in a sequence encoding a Cas12a correspond to the most frequently used codon for a particular amino acid.

[0071] Additionally, codon-optimized Cas12a polypeptides are provided, including codon-optimized Cas12a polypeptides for CRISPR ribonucleoprotein complexes, wherein the Cas12a polypeptide sequence optimized for expression in prokaryotes, such as bacteria (e.g., E. coli).

### Applications

[0072] This invention is useful for either basic research or therapeutic fields for any CRISPR/Cas12a DNA cleavage and/or gene editing experiments or treatments. The superior activity of these recombinant variants could be applied to Cas12a from any species or potentially any CRISPR enzyme.

[0073] In a first aspect, A CRISPR-associated protein comprising a polypeptide encoding a variant of AsCpf1 is provided. The variant of AsCpf1 is selected from the group consisting of M537R (SEQ ID NO.: 472), F870L (SEQ ID NO.: 473), and M537R/F870L (SEQ ID NO.: 465). In a first respect, the CRISPR-associated protein corresponds to a variant of AsCpf1 is M537R. In a second respect, the CRISPR-associated protein corresponds to a variant of AsCpf1 is F870L (SEQ ID NO.: 473). In a third respect, the CRISPR-associated protein corresponds to a variant of AsCpf1 is M537R/F870L (SEQ ID NO.: 465).

[0074] In a second aspect, a CRISPR ribonucleoprotein complex is provided. The CRISPR ribonucleoprotein complex includes a guide RNA and a CRISPR-associated protein. The CRISPR-associated protein including a polypeptide encoding a variant of AsCpf1. The variant of AsCpf1 is selected from the group consisting of M537R (SEQ ID NO.: 472), F870L (SEQ ID NO.: 473), and M537R/F870L (SEQ ID NO.: 465). In a first respect, the CRISPR ribonucleoprotein complex includes the variant of AsCpf1 being M537R. In a second respect, the CRISPR ribonucleoprotein complex includes the variant of AsCpf1 being F870L (SEQ ID NO.: 473). In a third respect, the CRISPR ribonucleoprotein complex includes the variant of AsCpf1 being M537R/F870L (SEQ ID NO.: 465).

[0075] In a third aspect, a method of increasing efficiency of gene editing at TTTN PAM sites in a cell with a CRISPR ribonucleoprotein complex is provided. The method includes the step of contacting a cell with the CRISPR ribonucleoprotein complex. The CRISPR ribonucleoprotein complex includes a guide RNA and a CRISPR-associated protein. The CRISPR-associated protein including a polypeptide encoding a variant of AsCpf1. The variant of AsCpf1 is selected from the group consisting of M537R (SEQ ID NO.: 472), F870L (SEQ ID NO.: 473) and M537R/F870L (SEQ ID NO.: 465). In a first respect, the TTTN PAM sites consists of one selected form the group of TTTA, TTTT and TTTC PAM sites.

[0076] In a fourth aspect, a kit includes a guide RNA and a CRISPR-associated protein is provided. The CRISPR-associated protein includes a polypeptide encoding a variant of AsCpf1. The variant of AsCpf1 is selected from the group consisting of M537R (SEQ ID NO.: 472), F870L (SEQ ID NO.: 473), and M537R/F870L (SEQ ID NO.: 465). In a first respect, the variant of AsCpf1 is M537R. In a second respect, the variant of AsCpf1 is F870L (SEQ ID NO.: 473). In a third respect, the variant of AsCpf1 is M537R/F870L (SEQ ID NO.: 465).

[0077] In a fifth aspect, a CRISPR-associated protein comprising a polypeptide encoding a variant of AsCas12a, wherein the variant of AsCas12a is selected from the group consisting of at least one variant amino acid selected from amino acid positions 499-640 and 840-913, provided that the variant AsCas12a provides an improvement in CRISPR/AsCas12a-associated nuclease activity at non-canonical TTTT PAM sites. In a first respect, the variant of AsCas12a is selected from the group consisting of SEQ ID NOs.: 59-245. In a second respect, the variant of AsCas12a, as described in the first aspect or the foregoing first respect of the first aspect, further comprises mutations of M537R/F870L (SEQ ID NO.: 465).

[0078] In a sixth aspect, a CRISPR ribonucleoprotein complex is provided. The CRISPR ribonucleoprotein complex includes a guide RNA and a CRISPR-associated protein. The CRISPR-associated protein includes a polypeptide encoding a variant of AsCas12a, wherein the variant of AsCas12a is selected from the group consisting of at least one variant amino acid selected from amino acid positions 499-640 and 840-913, provided that the variant AsCas12a provides an improvement in CRISPR/AsCas12a-associated nuclease activity at non-canonical TTTT PAM sites. In a first respect, the variant of AsCas12a is selected from the group consisting of SEQ ID NOs.: 59-245. In a second respect, the variant of AsCas12a, as described in the second aspect or the foregoing first respect of the second aspect, further comprises mutations of M537R/F870L (SEQ ID NO.: 465).

[0079] In a seventh aspect, a method of increasing efficiency of gene editing at non-canonical TTTT PAM sites in a cell with a CRISPR ribonucleoprotein complex is provided. The method includes a step of contacting a cell with the CRISPR ribonucleoprotein complex that includes a guide RNA and a CRISPR-associated protein. The CRISPR-associated protein includes a polypeptide encoding a variant of AsCas12a, wherein the variant of AsCas12a is selected from the group consisting of at least one variant amino acid selected from amino acid positions 499-640 and 840-913, provided that the variant AsCas12a provides an improvement in CRISPR/AsCas12a-associated nuclease activity at non-canonical TTTT PAM sites. In a first respect, the variant of AsCas12a is selected from the group consisting of SEQ ID NOs.: 59-245. In a second respect, the variant of AsCas12a, as described in the third aspect or the foregoing first respect of the third aspect, further comprises mutations of M537R/F870L (SEQ ID NO.: 465).

[0080] In an eighth aspect, a kit including a guide RNA and a CRISPR-associated protein comprising a polypeptide encoding a variant of AsCas12a is provided. The variant of AsCas12a is selected from the group consisting of at least one variant amino acid selected from amino acid positions 499-640 and 840-913, provided that the variant AsCas12a provides an improvement in CRISPR/AsCas12a-associated nuclease activity at non-canonical TTTT PAM sites. In a first respect, the variant of AsCas12a is selected from the group consisting of SEQ ID NOs.: 59-245. In a second respect, the variant of AsCas12a, as described in the fourth aspect or the foregoing first respect of the fourth aspect, further comprises mutations of M537R/F870L (SEQ ID NO.: 465).

[0081] In a ninth aspect, a nucleic acid encoding a CRISPR-associated protein comprising a polypeptide encoding a variant of AsCas12a is provided. The variant of AsCas12a is selected from the group consisting of at least one variant amino acid selected from amino acid positions 499-640 and 840-913, provided that the variant AsCas12a provides an improvement in CRISPR/AsCas12a-associated nuclease activity at non-canonical TTTT PAM sites. Highly preferred nucleic acids encoding a CRISPR-associated protein include isolated nucleic acids encoding a CRISPR-associated protein. In a first respect, the variant of AsCas12a is selected from the group consisting of SEQ ID NOs.: 59-245. In a second respect, the variant of AsCas12a further includes mutations of M537R/F870L (SEQ ID NO.: 465). In a third respect, the nucleic acid is operably linked to suitable transcription elements to express the nucleic acid. In a fourth respect, the nucleic acid is DNA or RNA.

[0082] In a tenth aspect, a polynucleotide sequence encoding a Cas12a polypeptide is provided. The polynucleotide sequence includes one member selected from the group consisting of SEQ ID NOs.: 5-17.

[0083] In an eleventh aspect, an amino acid sequence encoding a Cas12a polypeptide is provided. The amino acid sequence includes one member selected from the group consisting of SEQ ID NOs.: 18-30.

[0084] In a twelfth aspect, a CAS endonuclease system comprising an expression cassette encoding a polynucleotide sequence encoding a Cas12a polypeptide is provided. The includes one member selected from the group consisting of SEQ ID NOs.: 5-17.

[0085] In a thirteenth aspect, CAS endonuclease system comprising an amino acid sequence encoding a Cas12a polypeptide is provided The amino acid sequence includes one member selected from the group consisting of SEQ ID NOs.: 18-30.

[0086] In a fourteenth aspect, a method of performing genome editing in a eukaryotic cells is provided. The method includes the step of introducing an CAS endonuclease system into the eukaryotic cell, said CAS endonuclease system comprising an expression cassette encoding a polynucleotide sequence encoding a Cas12a polypeptide, comprising one member selected from the group consisting of SEQ ID NOs.: 5-17.

[0087] In a fifteenth aspect, a method of performing genome editing in a eukaryotic cell is provided. The method includes the step of introducing an CAS endonuclease system into the eukaryotic cell, said CAS endonuclease system comprising an amino acid sequence encoding a Cas12a polypeptide comprising one member selected from the group consisting of SEQ ID NOs.: 18-30.

[0088] In a sixteenth aspect, an CRISPR-associated protein comprising a fusion polypeptide is provided. The fusion polypeptide includes an AsCas12a open reading frame, a nuclear localization signal, optionally an amino acid linker and optionally an affinity tag. Highly preferred CRISPR-associated proteins include isolated CRISPR-associated proteins. In a first respect, the AsCas12a open reading frame is selected from the group consisting of SEQ ID NOs.: 59-245. In a second respect, the nuclear localization signal is selected from SEQ ID NOs.: 475, 477, 479, 481 and 483. In a third respect, the CRISPR-associated protein is encoded by SEQ ID NOs.: 488-491. In a fourth respect, the CRISPR-associated protein is selected from SEQ ID NOs.: 492 and 493.

[0089] In a seventeenth aspect, a method of performing genome editing in a eukaryotic cell is provided. The method includes the step of introducing an CAS endonuclease system into the eukaryotic cell, said CAS endonuclease system comprising an CRISPR-associated protein of according to the sixteenth aspect. Highly preferred CRISPR-associated proteins include isolated CRISPR-associated proteins.

### EXAMPLES

### Example 1

### Recombinant Cas12a Proteins with Varying Tags/Linker Sequences Yield a Spectrum of Editing Efficiencies

[0090] The following Example demonstrates that recombinant Cas12a proteins with only modest changes in tag sequences at the amino- and carboxy-termini results in proteins that demonstrate a wide range of editing efficiencies in human cells (FIG. 1).

[0091] Briefly, the method of site directed mutagenesis (SDM) was employed to create the expression constructs having As Cas12a coding sequences with different nuclear localization signals (NLS's). Site directed mutagenesis was performed by designing complimentary primers that encompass the desired nucleotide base change(s), along with flanking plasmid vector sequence, wherein each flanking region has a melting temperature (Tₘ) of at least 60° C. A polymerase chain reaction (PCR) run was then performed using standard cycling conditions for a total of 16 cycles. The restriction enzyme, DPN I, was added to digest away the starting plasmid vector material so only the new product containing the base changes remain. After DPN I treatment, a small amount of the PCR product was transformed into competent E. coli cells, recovered in SOC media and plated onto kanamycin resistance Luria Broth (LB) agar plates. Colonies were screened using the Sanger sequencing method to verify correct base changes in selected clones.

[0092] The results indicate that the ideal sequence and placement of NLS sequences on Cas12a is not obvious, and that a highly efficient Cas12a genome editing solution must be empirically determined as was done in this study. Proteins were tested using guides that target the HPRT-38186 (SEQ ID NO.:1) and HPRT-38228 (SEQ ID NO.:2) loci in human cells. SEQ ID NOs.: 1-4 are depicted in Table 1.

TABLE 1
Sequence of oligonucleotides used as
crRNAs or PCR primers.

| Name | Sequence | SEQ ID NO. |
|---|---|---|
| HPRT- | rUrArArUrUrUrCrUrArCrUrCrUrUr | SEQ ID NO. 1 |
| 38186-S | GrUrArGrArUrUrArArUrGrCrCr | |
| | CrUrGrUrArGrUrCrUrCrUrCrUrG | |
| HPRT- | rUrArArUrUrUrCrUrArCrUrCrUr | SEQ ID NO. 2 |
| 38228-S | UrGrUrArGrArUrUrArArUrUrArAr | |
| | CrArGrCrUrUrGrCrUrGrGrUrGrA | |
| HPRT-FWD | AAGAATGTTGTGATAAAAGGTGATGCT | SEQ ID NO. 3 |
| HPRT-REV | GAGGCAGAAGTCCCATGGATGTGT | SEQ ID NO. 4 |

[0093] The following nucleotide sequences that encode preferred Cas12a polypeptides of this Example are depicted below:

SEQ ID NO.: 5
ATGGGCAGCAGCAGCAGCGGCCTGGTGCCGCGCGGCAGCCATATGGCTAGCATGACTGGT
GGACAGCAAATGGGTCGGGATCCAGGTAAACCGATTCCGAATCCGCTGCTGGGTCTGGATAGCACCGCACCG
AAAAAAAAACGTAAAGTTGGTATTCATGGTGTTCCGGCAGCAACCCAGTTTGAAGGTTTCACCAATCTGTATC
AGGTTAGCAAAACCCTGCGTTTTGAACTGATTCCGCAGGGTAAAACCCTGAAACATATTCAAGAACAGGGCTT
CATCGAAGAGGATAAAGCACGTAACGATCACTACAAAGAACTGAAACCGATTATCGACCGCATCTATAAAACC
TATGCAGATCAGTGTCTGCAGCTGGTTCAGCTGGATTGGGAAAATCTGAGCGCAGCAATTGATAGTTATCGCA
AAGAAAAAACCGAAGAAACCCGTAATGCACTGATTGAAGAACAGGCAACCTATCGTAATGCCATCCATGATT
ATTTCATTGGTCGTACCGATAATCTGACCGATGCAATTAACAAACGTCACGCCGAAATCTATAAAGGCCTGTTT
AAAGCCGAACTGTTTAATGGCAAAGTTCTGAAACAGCTGGGCACCGTTACCACCACCGAACATGAAAATGCAC
TGCTGCGTAGCTTTGATAAATTCACCACCTATTTCAGCGGCTTTTATGAGAATCGCAAAAACGTGTTTAGCGCA
GAAGATATTAGCACCGCAATTCCGCATCGTATTGTGCAGGATAATTTCCCGAAATTCAAAGAGAACTGCCACA
TTTTTACCCGTCTGATTACCGCAGTTCCGAGCCTGCGTGAACATTTTGAAAACGTTAAAAAAGCCATCGGCATC
TTTGTTAGCACCAGCATTGAAGAAGTTTTTAGCTTCCCGTTTTACAATCAGCTGCTGACCCAGACCCAGATTGA
TCTGTATAACCAACTGCTGGGTGGTATTAGCCGTGAAGCAGGCACCGAAAAAATCAAAGGTCTGAATGAAGT
GCTGAATCTGGCCATTCAGAAAAATGATGAAACCGCACATATTATTGCAAGCCTGCCGCATCGTTTTATTCCGC
TGTTCAAACAAATTCTGAGCGATCGTAATACCCTGAGCTTTATTCTGGAAGAATTCAAATCCGATGAAGAGGT
GATTCAGAGCTTTTGCAAATACAAAACGCTGCTGCGCAATGAAAATGTTCTGGAAACTGCCGAAGCACTGTTT
AACGAACTGAATAGCATTGATCTGACCCACATCTTTATCAGCCACAAAAAACTGGAAACCATTTCAAGCGCACT
GTGTGATCATTGGGATACCCTGCGTAATGCCCTGTATGAACGTCGTATTAGCGAACTGACCGGTAAAATTACC
AAAAGCGCGAAAGAAAAAGTTCAGCGCAGTCTGAAACATGAGGATATTAATCTGCAAGAGATTATTAGCGCA
GCCGGTAAAGAACTGTCAGAAGCATTTAAACAGAAAACCAGCGAAATTCTGTCACATGCACATGCAGCACTG
GATCAGCCGCTGCCGACCACCCTGAAAAAACAAGAAGAAAAAGAAATCCTGAAAAGCCAGCTGGATAGCCTG
CTGGGTCTGTATCATCTGCTGGACTGGTTTGCAGTTGATGAAAGCAATGAAGTTGATCCGGAATTTAGCGCAC
GTCTGACCGGCATTAAACTGGAAATGGAACCGAGCCTGAGCTTTTATAACAAAGCCCGTAATTATGCCACCAA
AAAACCGTATAGCGTCGAAAAATTCAAACTGAACTTTCAGATGCCGACCCTGGCAAGCGGTTGGGATGTTAAT
AAAGAAAAAAACAACGGTGCCATCCTGTTCGTGAAAAATGGCCTGTATTATCTGGGTATTATGCCGAAACAGA
AAGGTCGTTATAAAGCGCTGAGCTTTGAACCGACGGAAAAAACCAGTGAAGGTTTTGATAAAATGTACTACG
ACTATTTTCCGGATGCAGCCAAAATGATTCCGAAATGTAGCACCCAGCTGAAAGCAGTTACCGCACATTTTCA
GACCCATACCACCCCGATTCTGCTGAGCAATAACTTTATTGAACCGCTGGAAATCACCAAAGAGATCTACGAT
CTGAATAACCCGGAAAAAGAGCCGAAAAAATTCCAGACCGCATATGCAAAAAAAACCGGTGATCAGAAAGGT
TATCGTGAAGCGCTGTGTAAATGGATTGATTTCACCCGTGATTTTCTGAGCAAATACACCAAAACCACCAGTAT
CGATCTGAGCAGCCTGCGTCCGAGCAGCCAGTATAAAGATCTGGGCGAATATTATGCAGAACTGAATCCGCT
GCTGTATCATATTAGCTTTCAGCGTATTGCCGAGAAAGAAATCATGGACGCAGTTGAAACCGGTAAACTGTAC
CTGTTCCAGATCTACAATAAAGATTTTGCCAAAGGCCATCATGGCAAACCGAATCTGCATACCCTGTATTGGAC
CGGTCTGTTTAGCCCTGAAAATCTGGCAAAAACCTCGATTAAACTGAATGGTCAGGCGGAACTGTTTTATCGT
CCGAAAAGCCGTATGAAACGTATGGCACATCGTCTGGGTGAAAAAATGCTGAACAAAAAACTGAAAGACCAG
AAAACCCCGATCCCGGATACACTGTATCAAGAACTGTATGATTATGTGAACCATCGTCTGAGCCATGATCTGA
GTGATGAAGCACGTGCCCTGCTGCCGAATGTTATTACCAAAGAAGTTAGCCACGAGATCATTAAAGATCGTCG
TTTTACCAGCGACAAATTCTTTTTTCATGTGCCGATTACCCTGAATTATCAGGCAGCAAATAGCCCGAGCAAAT
TTAACCAGCGTGTTAATGCATATCTGAAAGAACATCCAGAAACGCCGATTATTGGTATTGATCGTGGTGAACG
TAACCTGATTTATATCACCGTTATTGATAGCACCGGCAAAATCCTGGAACAGCGTAGCCTGAATACCATTCAGC
AGTTTGATTACCAGAAAAAACTGGATAATCGCGAGAAAGAACGTGTTGCAGCACGTCAGGCATGGTCAGTTG
TTGGTACAATTAAAGACCTGAAACAGGGTTATCTGAGCCAGGTTATTCATGAAATTGTGGATCTGATGATTCA
CTATCAGGCCGTTGTTGTGCTGGAAAACCTGAATTTTGGCTTTAAAAGCAAACGTACCGGCATTGCAGAAAAA
GCAGTTTATCAGCAGTTCGAGAAAATGCTGATTGACAAACTGAATTGCCTGGTGCTGAAAGATTATCCGGCTG
AAAAAGTTGGTGGTGTTCTGAATCCGTATCAGCTGACCGATCAGTTTACCAGCTTTGCAAAAATGGGCACCCA
GAGCGGATTTCTGTTTTATGTTCCGGCACCGTATACGAGCAAAATTGATCCGCTGACCGGTTTTGTTGATCCGT
TTGTTTGGAAAACCATCAAAAACCATGAAAGCCGCAAACATTTTCTGGAAGGTTTCGATTTTCTGCATTACGAC
GTTAAAACGGGTGATTTCATCCTGCACTTTAAAATGAATCGCAATCTGAGTTTTCAGCGTGGCCTGCCTGGTTT
TATGCCTGCATGGGATATTGTGTTTGAGAAAAACGAAACACAGTTCGATGCAAAAGGCACCCCGTTTATTGCA
GGTAAACGTATTGTTCCGGTGATTGAAAATCATCGTTTCACCGGTCGTTATCGCGATCTGTATCCGGCAAATG
AACTGATCGCACTGCTGGAAGAGAAAGGTATTGTTTTTCGTGATGGCTCAAACATTCTGCCGAAACTGCTGGA
AAATGATGATAGCCATGCAATTGATACCATGGTTGCACTGATTCGTAGCGTTCTGCAGATGCGTAATAGCAAT
GCAGCAACCGGTGAAGATTACATTAATAGTCCGGTTCGTGATCTGAATGGTGTTTGTTTTGATAGCCGTTTTCA
GAATCCGGAATGGCCGATGGATGCAGATGCAAATGGTGCATATCATATTGCACTGAAAGGACAGCTGCTGCT
GAACCACCTGAAAGAAAGCAAAGATCTGAAACTGCAAAACGGCATTAGCAATCAGGATTGGCTGGCATATAT
CCAAGAACTGCGTAACCCTAAAAAAAAACGCAAAGTGAAGCTTGCGGCCGCACTCGAGCACCACCACCACCA
CCACTGA
SEQ ID NO.: 6
ATGGGCAGCAGCAGCAGCGGCCTGGTGCCGCGCGGCAGCCATATGGCTAGCATGACTGGT
GGACAGCAAATGGGTCGGGATCCAGCACCGAAAAAAAAACGTAAAGTTGGTATTCATGGTGTTCCGGCAGCA
ACCCAGTTTGAAGGTTTCACCAATCTGTATCAGGTTAGCAAAACCCTGCGTTTTGAACTGATTCCGCAGGGTAA
AACCCTGAAACATATTCAAGAACAGGGCTTCATCGAAGAGGATAAAGCACGTAACGATCACTACAAAGAACT
GAAACCGATTATCGACCGCATCTATAAAACCTATGCAGATCAGTGTCTGCAGCTGGTTCAGCTGGATTGGGAA
AATCTGAGCGCAGCAATTGATAGTTATCGCAAAGAAAAAACCGAAGAAACCCGTAATGCACTGATTGAAGAA
CAGGCAACCTATCGTAATGCCATCCATGATTATTTCATTGGTCGTACCGATAATCTGACCGATGCAATTAACAA
ACGTCACGCCGAAATCTATAAAGGCCTGTTTAAAGCCGAACTGTTTAATGGCAAAGTTCTGAAACAGCTGGGC
ACCGTTACCACCACCGAACATGAAAATGCACTGCTGCGTAGCTTTGATAAATTCACCACCTATTTCAGCGGCTT
TTATGAGAATCGCAAAAACGTGTTTAGCGCAGAAGATATTAGCACCGCAATTCCGCATCGTATTGTGCAGGAT
AATTTCCCGAAATTCAAAGAGAACTGCCACATTTTTACCCGTCTGATTACCGCAGTTCCGAGCCTGCGTGAACA
TTTTGAAAACGTTAAAAAAGCCATCGGCATCTTTGTTAGCACCAGCATTGAAGAAGTTTTTAGCTTCCCGTTTT
ACAATCAGCTGCTGACCCAGACCCAGATTGATCTGTATAACCAACTGCTGGGTGGTATTAGCCGTGAAGCAGG
CACCGAAAAAATCAAAGGTCTGAATGAAGTGCTGAATCTGGCCATTCAGAAAAATGATGAAACCGCACATATT
ATTGCAAGCCTGCCGCATCGTTTTATTCCGCTGTTCAAACAAATTCTGAGCGATCGTAATACCCTGAGCTTTATT
CTGGAAGAATTCAAATCCGATGAAGAGGTGATTCAGAGCTTTTGCAAATACAAAACGCTGCTGCGCAATGAA
AATGTTCTGGAAACTGCCGAAGCACTGTTTAACGAACTGAATAGCATTGATCTGACCCACATCTTTATCAGCCA
CAAAAAACTGGAAACCATTTCAAGCGCACTGTGTGATCATTGGGATACCCTGCGTAATGCCCTGTATGAACGT
CGTATTAGCGAACTGACCGGTAAAATTACCAAAAGCGCGAAAGAAAAAGTTCAGCGCAGTCTGAAACATGAG
GATATTAATCTGCAAGAGATTATTAGCGCAGCCGGTAAAGAACTGTCAGAAGCATTTAAACAGAAAACCAGC
GAAATTCTGTCACATGCACATGCAGCACTGGATCAGCCGCTGCCGACCACCCTGAAAAAACAAGAAGAAAAA
GAAATCCTGAAAAGCCAGCTGGATAGCCTGCTGGGTCTGTATCATCTGCTGGACTGGTTTGCAGTTGATGAAA
GCAATGAAGTTGATCCGGAATTTAGCGCACGTCTGACCGGCATTAAACTGGAAATGGAACCGAGCCTGAGCT
TTTATAACAAAGCCCGTAATTATGCCACCAAAAAACCGTATAGCGTCGAAAAATTCAAACTGAACTTTCAGATG
CCGACCCTGGCAAGCGGTTGGGATGTTAATAAAGAAAAAAACAACGGTGCCATCCTGTTCGTGAAAAATGGC
CTGTATTATCTGGGTATTATGCCGAAACAGAAAGGTCGTTATAAAGCGCTGAGCTTTGAACCGACGGAAAAA
ACCAGTGAAGGTTTTGATAAAATGTACTACGACTATTTTCCGGATGCAGCCAAAATGATTCCGAAATGTAGCA
CCCAGCTGAAAGCAGTTACCGCACATTTTCAGACCCATACCACCCCGATTCTGCTGAGCAATAACTTTATTGAA
CCGCTGGAAATCACCAAAGAGATCTACGATCTGAATAACCCGGAAAAAGAGCCGAAAAAATTCCAGACCGCA
TATGCAAAAAAAACCGGTGATCAGAAAGGTTATCGTGAAGCGCTGTGTAAATGGATTGATTTCACCCGTGATT
TTCTGAGCAAATACACCAAAACCACCAGTATCGATCTGAGCAGCCTGCGTCCGAGCAGCCAGTATAAAGATCT
GGGCGAATATTATGCAGAACTGAATCCGCTGCTGTATCATATTAGCTTTCAGCGTATTGCCGAGAAAGAAATC
ATGGACGCAGTTGAAACCGGTAAACTGTACCTGTTCCAGATCTACAATAAAGATTTTGCCAAAGGCCATCATG
GCAAACCGAATCTGCATACCCTGTATTGGACCGGTCTGTTTAGCCCTGAAAATCTGGCAAAAACCTCGATTAA
ACTGAATGGTCAGGCGGAACTGTTTTATCGTCCGAAAAGCCGTATGAAACGTATGGCACATCGTCTGGGTGA
AAAAATGCTGAACAAAAAACTGAAAGACCAGAAAACCCCGATCCCGGATACACTGTATCAAGAACTGTATGA
TTATGTGAACCATCGTCTGAGCCATGATCTGAGTGATGAAGCACGTGCCCTGCTGCCGAATGTTATTACCAAA
GAAGTTAGCCACGAGATCATTAAAGATCGTCGTTTTACCAGCGACAAATTCTTTTTTCATGTGCCGATTACCCT
GAATTATCAGGCAGCAAATAGCCCGAGCAAATTTAACCAGCGTGTTAATGCATATCTGAAAGAACATCCAGAA
ACGCCGATTATTGGTATTGATCGTGGTGAACGTAACCTGATTTATATCACCGTTATTGATAGCACCGGCAAAAT
CCTGGAACAGCGTAGCCTGAATACCATTCAGCAGTTTGATTACCAGAAAAAACTGGATAATCGCGAGAAAGA
ACGTGTTGCAGCACGTCAGGCATGGTCAGTTGTTGGTACAATTAAAGACCTGAAACAGGGTTATCTGAGCCA
GGTTATTCATGAAATTGTGGATCTGATGATTCACTATCAGGCCGTTGTTGTGCTGGAAAACCTGAATTTTGGCT
TTAAAAGCAAACGTACCGGCATTGCAGAAAAAGCAGTTTATCAGCAGTTCGAGAAAATGCTGATTGACAAACT
GAATTGCCTGGTGCTGAAAGATTATCCGGCTGAAAAAGTTGGTGGTGTTCTGAATCCGTATCAGCTGACCGAT
CAGTTTACCAGCTTTGCAAAAATGGGCACCCAGAGCGGATTTCTGTTTTATGTTCCGGCACCGTATACGAGCA
AAATTGATCCGCTGACCGGTTTTGTTGATCCGTTTGTTTGGAAAACCATCAAAAACCATGAAAGCCGCAAACA
TTTTCTGGAAGGTTTCGATTTTCTGCATTACGACGTTAAAACGGGTGATTTCATCCTGCACTTTAAAATGAATC
GCAATCTGAGTTTTCAGCGTGGCCTGCCTGGTTTTATGCCTGCATGGGATATTGTGTTTGAGAAAAACGAAAC
ACAGTTCGATGCAAAAGGCACCCCGTTTATTGCAGGTAAACGTATTGTTCCGGTGATTGAAAATCATCGTTTCA
CCGGTCGTTATCGCGATCTGTATCCGGCAAATGAACTGATCGCACTGCTGGAAGAGAAAGGTATTGTTTTTCG
TGATGGCTCAAACATTCTGCCGAAACTGCTGGAAAATGATGATAGCCATGCAATTGATACCATGGTTGCACTG
ATTCGTAGCGTTCTGCAGATGCGTAATAGCAATGCAGCAACCGGTGAAGATTACATTAATAGTCCGGTTCGTG
ATCTGAATGGTGTTTGTTTTGATAGCCGTTTTCAGAATCCGGAATGGCCGATGGATGCAGATGCAAATGGTGC
ATATCATATTGCACTGAAAGGACAGCTGCTGCTGAACCACCTGAAAGAAAGCAAAGATCTGAAACTGCAAAA
CGGCATTAGCAATCAGGATTGGCTGGCATATATCCAAGAACTGCGTAACCCTAAAAAAAAACGCAAAGTGAA
GCTTGCGGCCGCACTCGAGCACCACCACCACCACCACTGA
SEQ ID NO.: 7
ATGCCGAAAAAAAAACGCAAAGTGGGTATTCATGGTGTTCCGGCAGCAACCCAGTTTGAA
GGTTTCACCAATCTGTATCAGGTTAGCAAAACCCTGCGTTTTGAACTGATTCCGCAGGGTAAAACCCTGAAAC
ATATTCAAGAACAGGGCTTCATCGAAGAGGATAAAGCACGTAACGATCACTACAAAGAACTGAAACCGATTA
TCGACCGCATCTATAAAACCTATGCAGATCAGTGTCTGCAGCTGGTTCAGCTGGATTGGGAAAATCTGAGCGC
AGCAATTGATAGTTATCGCAAAGAAAAAACCGAAGAAACCCGTAATGCACTGATTGAAGAACAGGCAACCTA
TCGTAATGCCATCCATGATTATTTCATTGGTCGTACCGATAATCTGACCGATGCAATTAACAAACGTCACGCCG
AAATCTATAAAGGCCTGTTTAAAGCCGAACTGTTTAATGGCAAAGTTCTGAAACAGCTGGGCACCGTTACCAC
CACCGAACATGAAAATGCACTGCTGCGTAGCTTTGATAAATTCACCACCTATTTCAGCGGCTTTTATGAGAATC
GCAAAAACGTGTTTAGCGCAGAAGATATTAGCACCGCAATTCCGCATCGTATTGTGCAGGATAATTTCCCGAA
ATTCAAAGAGAACTGCCACATTTTTACCCGTCTGATTACCGCAGTTCCGAGCCTGCGTGAACATTTTGAAAACG
TTAAAAAAGCCATCGGCATCTTTGTTAGCACCAGCATTGAAGAAGTTTTTAGCTTCCCGTTTTACAATCAGCTG
CTGACCCAGACCCAGATTGATCTGTATAACCAACTGCTGGGTGGTATTAGCCGTGAAGCAGGCACCGAAAAA
ATCAAAGGTCTGAATGAAGTGCTGAATCTGGCCATTCAGAAAAATGATGAAACCGCACATATTATTGCAAGCC
TGCCGCATCGTTTTATTCCGCTGTTCAAACAAATTCTGAGCGATCGTAATACCCTGAGCTTTATTCTGGAAGAA
TTCAAATCCGATGAAGAGGTGATTCAGAGCTTTTGCAAATACAAAACGCTGCTGCGCAATGAAAATGTTCTGG
AAACTGCCGAAGCACTGTTTAACGAACTGAATAGCATTGATCTGACCCACATCTTTATCAGCCACAAAAAACT
GGAAACCATTTCAAGCGCACTGTGTGATCATTGGGATACCCTGCGTAATGCCCTGTATGAACGTCGTATTAGC
GAACTGACCGGTAAAATTACCAAAAGCGCGAAAGAAAAAGTTCAGCGCAGTCTGAAACATGAGGATATTAAT
CTGCAAGAGATTATTAGCGCAGCCGGTAAAGAACTGTCAGAAGCATTTAAACAGAAAACCAGCGAAATTCTG
TCACATGCACATGCAGCACTGGATCAGCCGCTGCCGACCACCCTGAAAAAACAAGAAGAAAAAGAAATCCTG
AAAAGCCAGCTGGATAGCCTGCTGGGTCTGTATCATCTGCTGGACTGGTTTGCAGTTGATGAAAGCAATGAA
GTTGATCCGGAATTTAGCGCACGTCTGACCGGCATTAAACTGGAAATGGAACCGAGCCTGAGCTTTTATAACA
AAGCCCGTAATTATGCCACCAAAAAACCGTATAGCGTCGAAAAATTCAAACTGAACTTTCAGATGCCGACCCT
GGCAAGCGGTTGGGATGTTAATAAAGAAAAAAACAACGGTGCCATCCTGTTCGTGAAAAATGGCCTGTATTA
TCTGGGTATTATGCCGAAACAGAAAGGTCGTTATAAAGCGCTGAGCTTTGAACCGACGGAAAAAACCAGTGA
AGGTTTTGATAAAATGTACTACGACTATTTTCCGGATGCAGCCAAAATGATTCCGAAATGTAGCACCCAGCTG
AAAGCAGTTACCGCACATTTTCAGACCCATACCACCCCGATTCTGCTGAGCAATAACTTTATTGAACCGCTGGA
AATCACCAAAGAGATCTACGATCTGAATAACCCGGAAAAAGAGCCGAAAAAATTCCAGACCGCATATGCAAA
AAAAACCGGTGATCAGAAAGGTTATCGTGAAGCGCTGTGTAAATGGATTGATTTCACCCGTGATTTTCTGAGC
AAATACACCAAAACCACCAGTATCGATCTGAGCAGCCTGCGTCCGAGCAGCCAGTATAAAGATCTGGGCGAA
TATTATGCAGAACTGAATCCGCTGCTGTATCATATTAGCTTTCAGCGTATTGCCGAGAAAGAAATCATGGACG
CAGTTGAAACCGGTAAACTGTACCTGTTCCAGATCTACAATAAAGATTTTGCCAAAGGCCATCATGGCAAACC
GAATCTGCATACCCTGTATTGGACCGGTCTGTTTAGCCCTGAAAATCTGGCAAAAACCTCGATTAAACTGAAT
GGTCAGGCGGAACTGTTTTATCGTCCGAAAAGCCGTATGAAACGTATGGCACATCGTCTGGGTGAAAAAATG
CTGAACAAAAAACTGAAAGACCAGAAAACCCCGATCCCGGATACACTGTATCAAGAACTGTATGATTATGTGA
ACCATCGTCTGAGCCATGATCTGAGTGATGAAGCACGTGCCCTGCTGCCGAATGTTATTACCAAAGAAGTTAG
CCACGAGATCATTAAAGATCGTCGTTTTACCAGCGACAAATTCTTTTTTCATGTGCCGATTACCCTGAATTATCA
GGCAGCAAATAGCCCGAGCAAATTTAACCAGCGTGTTAATGCATATCTGAAAGAACATCCAGAAACGCCGATT
ATTGGTATTGATCGTGGTGAACGTAACCTGATTTATATCACCGTTATTGATAGCACCGGCAAAATCCTGGAAC
AGCGTAGCCTGAATACCATTCAGCAGTTTGATTACCAGAAAAAACTGGATAATCGCGAGAAAGAACGTGTTG
CAGCACGTCAGGCATGGTCAGTTGTTGGTACAATTAAAGACCTGAAACAGGGTTATCTGAGCCAGGTTATTCA
TGAAATTGTGGATCTGATGATTCACTATCAGGCCGTTGTTGTGCTGGAAAACCTGAATTTTGGCTTTAAAAGC
AAACGTACCGGCATTGCAGAAAAAGCAGTTTATCAGCAGTTCGAGAAAATGCTGATTGACAAACTGAATTGC
CTGGTGCTGAAAGATTATCCGGCTGAAAAAGTTGGTGGTGTTCTGAATCCGTATCAGCTGACCGATCAGTTTA
CCAGCTTTGCAAAAATGGGCACCCAGAGCGGATTTCTGTTTTATGTTCCGGCACCGTATACGAGCAAAATTGA
TCCGCTGACCGGTTTTGTTGATCCGTTTGTTTGGAAAACCATCAAAAACCATGAAAGCCGCAAACATTTTCTGG
AAGGTTTCGATTTTCTGCATTACGACGTTAAAACGGGTGATTTCATCCTGCACTTTAAAATGAATCGCAATCTG
AGTTTTCAGCGTGGCCTGCCTGGTTTTATGCCTGCATGGGATATTGTGTTTGAGAAAAACGAAACACAGTTCG
ATGCAAAAGGCACCCCGTTTATTGCAGGTAAACGTATTGTTCCGGTGATTGAAAATCATCGTTTCACCGGTCGT
TATCGCGATCTGTATCCGGCAAATGAACTGATCGCACTGCTGGAAGAGAAAGGTATTGTTTTTCGTGATGGCT
CAAACATTCTGCCGAAACTGCTGGAAAATGATGATAGCCATGCAATTGATACCATGGTTGCACTGATTCGTAG
CGTTCTGCAGATGCGTAATAGCAATGCAGCAACCGGTGAAGATTACATTAATAGTCCGGTTCGTGATCTGAAT
GGTGTTTGTTTTGATAGCCGTTTTCAGAATCCGGAATGGCCGATGGATGCAGATGCAAATGGTGCATATCATA
TTGCACTGAAAGGACAGCTGCTGCTGAACCACCTGAAAGAAAGCAAAGATCTGAAACTGCAAAACGGCATTA
GCAATCAGGATTGGCTGGCATATATCCAAGAACTGCGTAACCCGAAAAAAAAACGCAAAGTGCTCGAGCACC
ACCACCACCACCACTGA
SEQ ID NO.: 8
ATGACCCAGTTTGAAGGTTTCACCAATCTGTATCAGGTTAGCAAAACCCTGCGTTTTGAACT
GATTCCGCAGGGTAAAACCCTGAAACATATTCAAGAACAGGGCTTCATCGAAGAGGATAAAGCACGTAACGA
TCACTACAAAGAACTGAAACCGATTATCGACCGCATCTATAAAACCTATGCAGATCAGTGTCTGCAGCTGGTT
CAGCTGGATTGGGAAAATCTGAGCGCAGCAATTGATAGTTATCGCAAAGAAAAAACCGAAGAAACCCGTAAT
GCACTGATTGAAGAACAGGCAACCTATCGTAATGCCATCCATGATTATTTCATTGGTCGTACCGATAATCTGAC
CGATGCAATTAACAAACGTCACGCCGAAATCTATAAAGGCCTGTTTAAAGCCGAACTGTTTAATGGCAAAGTT
CTGAAACAGCTGGGCACCGTTACCACCACCGAACATGAAAATGCACTGCTGCGTAGCTTTGATAAATTCACCA
CCTATTTCAGCGGCTTTTATGAGAATCGCAAAAACGTGTTTAGCGCAGAAGATATTAGCACCGCAATTCCGCA
TCGTATTGTGCAGGATAATTTCCCGAAATTCAAAGAGAACTGCCACATTTTTACCCGTCTGATTACCGCAGTTC
CGAGCCTGCGTGAACATTTTGAAAACGTTAAAAAAGCCATCGGCATCTTTGTTAGCACCAGCATTGAAGAAGT
TTTTAGCTTCCCGTTTTACAATCAGCTGCTGACCCAGACCCAGATTGATCTGTATAACCAACTGCTGGGTGGTA
TTAGCCGTGAAGCAGGCACCGAAAAAATCAAAGGTCTGAATGAAGTGCTGAATCTGGCCATTCAGAAAAATG
ATGAAACCGCACATATTATTGCAAGCCTGCCGCATCGTTTTATTCCGCTGTTCAAACAAATTCTGAGCGATCGT
AATACCCTGAGCTTTATTCTGGAAGAATTCAAATCCGATGAAGAGGTGATTCAGAGCTTTTGCAAATACAAAA
CGCTGCTGCGCAATGAAAATGTTCTGGAAACTGCCGAAGCACTGTTTAACGAACTGAATAGCATTGATCTGAC
CCACATCTTTATCAGCCACAAAAAACTGGAAACCATTTCAAGCGCACTGTGTGATCATTGGGATACCCTGCGTA
ATGCCCTGTATGAACGTCGTATTAGCGAACTGACCGGTAAAATTACCAAAAGCGCGAAAGAAAAAGTTCAGC
GCAGTCTGAAACATGAGGATATTAATCTGCAAGAGATTATTAGCGCAGCCGGTAAAGAACTGTCAGAAGCAT
TTAAACAGAAAACCAGCGAAATTCTGTCACATGCACATGCAGCACTGGATCAGCCGCTGCCGACCACCCTGAA
AAAACAAGAAGAAAAAGAAATCCTGAAAAGCCAGCTGGATAGCCTGCTGGGTCTGTATCATCTGCTGGACTG
GTTTGCAGTTGATGAAAGCAATGAAGTTGATCCGGAATTTAGCGCACGTCTGACCGGCATTAAACTGGAAAT
GGAACCGAGCCTGAGCTTTTATAACAAAGCCCGTAATTATGCCACCAAAAAACCGTATAGCGTCGAAAAATTC
AAACTGAACTTTCAGATGCCGACCCTGGCAAGCGGTTGGGATGTTAATAAAGAAAAAAACAACGGTGCCATC
CTGTTCGTGAAAAATGGCCTGTATTATCTGGGTATTATGCCGAAACAGAAAGGTCGTTATAAAGCGCTGAGCT
TTGAACCGACGGAAAAAACCAGTGAAGGTTTTGATAAAATGTACTACGACTATTTTCCGGATGCAGCCAAAAT
GATTCCGAAATGTAGCACCCAGCTGAAAGCAGTTACCGCACATTTTCAGACCCATACCACCCCGATTCTGCTGA
GCAATAACTTTATTGAACCGCTGGAAATCACCAAAGAGATCTACGATCTGAATAACCCGGAAAAAGAGCCGA
AAAAATTCCAGACCGCATATGCAAAAAAAACCGGTGATCAGAAAGGTTATCGTGAAGCGCTGTGTAAATGGA
TTGATTTCACCCGTGATTTTCTGAGCAAATACACCAAAACCACCAGTATCGATCTGAGCAGCCTGCGTCCGAGC
AGCCAGTATAAAGATCTGGGCGAATATTATGCAGAACTGAATCCGCTGCTGTATCATATTAGCTTTCAGCGTA
TTGCCGAGAAAGAAATCATGGACGCAGTTGAAACCGGTAAACTGTACCTGTTCCAGATCTACAATAAAGATTT
TGCCAAAGGCCATCATGGCAAACCGAATCTGCATACCCTGTATTGGACCGGTCTGTTTAGCCCTGAAAATCTG
GCAAAAACCTCGATTAAACTGAATGGTCAGGCGGAACTGTTTTATCGTCCGAAAAGCCGTATGAAACGTATG
GCACATCGTCTGGGTGAAAAAATGCTGAACAAAAAACTGAAAGACCAGAAAACCCCGATCCCGGATACACTG
TATCAAGAACTGTATGATTATGTGAACCATCGTCTGAGCCATGATCTGAGTGATGAAGCACGTGCCCTGCTGC
CGAATGTTATTACCAAAGAAGTTAGCCACGAGATCATTAAAGATCGTCGTTTTACCAGCGACAAATTCTTTTTT
CATGTGCCGATTACCCTGAATTATCAGGCAGCAAATAGCCCGAGCAAATTTAACCAGCGTGTTAATGCATATC
TGAAAGAACATCCAGAAACGCCGATTATTGGTATTGATCGTGGTGAACGTAACCTGATTTATATCACCGTTATT
GATAGCACCGGCAAAATCCTGGAACAGCGTAGCCTGAATACCATTCAGCAGTTTGATTACCAGAAAAAACTG
GATAATCGCGAGAAAGAACGTGTTGCAGCACGTCAGGCATGGTCAGTTGTTGGTACAATTAAAGACCTGAAA
CAGGGTTATCTGAGCCAGGTTATTCATGAAATTGTGGATCTGATGATTCACTATCAGGCCGTTGTTGTGCTGG
AAAACCTGAATTTTGGCTTTAAAAGCAAACGTACCGGCATTGCAGAAAAAGCAGTTTATCAGCAGTTCGAGAA
AATGCTGATTGACAAACTGAATTGCCTGGTGCTGAAAGATTATCCGGCTGAAAAAGTTGGTGGTGTTCTGAAT
CCGTATCAGCTGACCGATCAGTTTACCAGCTTTGCAAAAATGGGCACCCAGAGCGGATTTCTGTTTTATGTTCC
GGCACCGTATACGAGCAAAATTGATCCGCTGACCGGTTTTGTTGATCCGTTTGTTTGGAAAACCATCAAAAAC
CATGAAAGCCGCAAACATTTTCTGGAAGGTTTCGATTTTCTGCATTACGACGTTAAAACGGGTGATTTCATCCT
GCACTTTAAAATGAATCGCAATCTGAGTTTTCAGCGTGGCCTGCCTGGTTTTATGCCTGCATGGGATATTGTGT
TTGAGAAAAACGAAACACAGTTCGATGCAAAAGGCACCCCGTTTATTGCAGGTAAACGTATTGTTCCGGTGAT
TGAAAATCATCGTTTCACCGGTCGTTATCGCGATCTGTATCCGGCAAATGAACTGATCGCACTGCTGGAAGAG
AAAGGTATTGTTTTTCGTGATGGCTCAAACATTCTGCCGAAACTGCTGGAAAATGATGATAGCCATGCAATTG
ATACCATGGTTGCACTGATTCGTAGCGTTCTGCAGATGCGTAATAGCAATGCAGCAACCGGTGAAGATTACAT
TAATAGTCCGGTTCGTGATCTGAATGGTGTTTGTTTTGATAGCCGTTTTCAGAATCCGGAATGGCCGATGGAT
GCAGATGCAAATGGTGCATATCATATTGCACTGAAAGGACAGCTGCTGCTGAACCACCTGAAAGAAAGCAAA
GATCTGAAACTGCAAAACGGCATTAGCAATCAGGATTGGCTGGCATATATCCAAGAACTGCGTAACCCGAAA
AAAAAACGCAAAGTGCTCGAGCACCACCACCACCACCACTGA
SEQ ID NO.: 9
ATGGGCAGCAGCCATCATCATCATCATCACAGCAGCGGCCTGGTGCCGCGCGGCAGCCATA
TGGCTAGCATGACTGGTGGACAGCAAATGGGTCGGGATCCAACCCAGTTTGAAGGTTTCACCAATCTGTATCA
GGTTAGCAAAACCCTGCGTTTTGAACTGATTCCGCAGGGTAAAACCCTGAAACATATTCAAGAACAGGGCTTC
ATCGAAGAGGATAAAGCACGTAACGATCACTACAAAGAACTGAAACCGATTATCGACCGCATCTATAAAACCT
ATGCAGATCAGTGTCTGCAGCTGGTTCAGCTGGATTGGGAAAATCTGAGCGCAGCAATTGATAGTTATCGCA
AAGAAAAAACCGAAGAAACCCGTAATGCACTGATTGAAGAACAGGCAACCTATCGTAATGCCATCCATGATT
ATTTCATTGGTCGTACCGATAATCTGACCGATGCAATTAACAAACGTCACGCCGAAATCTATAAAGGCCTGTTT
AAAGCCGAACTGTTTAATGGCAAAGTTCTGAAACAGCTGGGCACCGTTACCACCACCGAACATGAAAATGCAC
TGCTGCGTAGCTTTGATAAATTCACCACCTATTTCAGCGGCTTTTATGAGAATCGCAAAAACGTGTTTAGCGCA
GAAGATATTAGCACCGCAATTCCGCATCGTATTGTGCAGGATAATTTCCCGAAATTCAAAGAGAACTGCCACA
TTTTTACCCGTCTGATTACCGCAGTTCCGAGCCTGCGTGAACATTTTGAAAACGTTAAAAAAGCCATCGGCATC
TTTGTTAGCACCAGCATTGAAGAAGTTTTTAGCTTCCCGTTTTACAATCAGCTGCTGACCCAGACCCAGATTGA
TCTGTATAACCAACTGCTGGGTGGTATTAGCCGTGAAGCAGGCACCGAAAAAATCAAAGGTCTGAATGAAGT
GCTGAATCTGGCCATTCAGAAAAATGATGAAACCGCACATATTATTGCAAGCCTGCCGCATCGTTTTATTCCGC
TGTTCAAACAAATTCTGAGCGATCGTAATACCCTGAGCTTTATTCTGGAAGAATTCAAATCCGATGAAGAGGT
GATTCAGAGCTTTTGCAAATACAAAACGCTGCTGCGCAATGAAAATGTTCTGGAAACTGCCGAAGCACTGTTT
AACGAACTGAATAGCATTGATCTGACCCACATCTTTATCAGCCACAAAAAACTGGAAACCATTTCAAGCGCACT
GTGTGATCATTGGGATACCCTGCGTAATGCCCTGTATGAACGTCGTATTAGCGAACTGACCGGTAAAATTACC
AAAAGCGCGAAAGAAAAAGTTCAGCGCAGTCTGAAACATGAGGATATTAATCTGCAAGAGATTATTAGCGCA
GCCGGTAAAGAACTGTCAGAAGCATTTAAACAGAAAACCAGCGAAATTCTGTCACATGCACATGCAGCACTG
GATCAGCCGCTGCCGACCACCCTGAAAAAACAAGAAGAAAAAGAAATCCTGAAAAGCCAGCTGGATAGCCTG
CTGGGTCTGTATCATCTGCTGGACTGGTTTGCAGTTGATGAAAGCAATGAAGTTGATCCGGAATTTAGCGCAC
GTCTGACCGGCATTAAACTGGAAATGGAACCGAGCCTGAGCTTTTATAACAAAGCCCGTAATTATGCCACCAA
AAAACCGTATAGCGTCGAAAAATTCAAACTGAACTTTCAGATGCCGACCCTGGCAAGCGGTTGGGATGTTAAT
AAAGAAAAAAACAACGGTGCCATCCTGTTCGTGAAAAATGGCCTGTATTATCTGGGTATTATGCCGAAACAGA
AAGGTCGTTATAAAGCGCTGAGCTTTGAACCGACGGAAAAAACCAGTGAAGGTTTTGATAAAATGTACTACG
ACTATTTTCCGGATGCAGCCAAAATGATTCCGAAATGTAGCACCCAGCTGAAAGCAGTTACCGCACATTTTCA
GACCCATACCACCCCGATTCTGCTGAGCAATAACTTTATTGAACCGCTGGAAATCACCAAAGAGATCTACGAT
CTGAATAACCCGGAAAAAGAGCCGAAAAAATTCCAGACCGCATATGCAAAAAAAACCGGTGATCAGAAAGGT
TATCGTGAAGCGCTGTGTAAATGGATTGATTTCACCCGTGATTTTCTGAGCAAATACACCAAAACCACCAGTAT
CGATCTGAGCAGCCTGCGTCCGAGCAGCCAGTATAAAGATCTGGGCGAATATTATGCAGAACTGAATCCGCT
GCTGTATCATATTAGCTTTCAGCGTATTGCCGAGAAAGAAATCATGGACGCAGTTGAAACCGGTAAACTGTAC
CTGTTCCAGATCTACAATAAAGATTTTGCCAAAGGCCATCATGGCAAACCGAATCTGCATACCCTGTATTGGAC
CGGTCTGTTTAGCCCTGAAAATCTGGCAAAAACCTCGATTAAACTGAATGGTCAGGCGGAACTGTTTTATCGT
CCGAAAAGCCGTATGAAACGTATGGCACATCGTCTGGGTGAAAAAATGCTGAACAAAAAACTGAAAGACCAG
AAAACCCCGATCCCGGATACACTGTATCAAGAACTGTATGATTATGTGAACCATCGTCTGAGCCATGATCTGA
GTGATGAAGCACGTGCCCTGCTGCCGAATGTTATTACCAAAGAAGTTAGCCACGAGATCATTAAAGATCGTCG
TTTTACCAGCGACAAATTCTTTTTTCATGTGCCGATTACCCTGAATTATCAGGCAGCAAATAGCCCGAGCAAAT
TTAACCAGCGTGTTAATGCATATCTGAAAGAACATCCAGAAACGCCGATTATTGGTATTGATCGTGGTGAACG
TAACCTGATTTATATCACCGTTATTGATAGCACCGGCAAAATCCTGGAACAGCGTAGCCTGAATACCATTCAGC
AGTTTGATTACCAGAAAAAACTGGATAATCGCGAGAAAGAACGTGTTGCAGCACGTCAGGCATGGTCAGTTG
TTGGTACAATTAAAGACCTGAAACAGGGTTATCTGAGCCAGGTTATTCATGAAATTGTGGATCTGATGATTCA
CTATCAGGCCGTTGTTGTGCTGGAAAACCTGAATTTTGGCTTTAAAAGCAAACGTACCGGCATTGCAGAAAAA
GCAGTTTATCAGCAGTTCGAGAAAATGCTGATTGACAAACTGAATTGCCTGGTGCTGAAAGATTATCCGGCTG
AAAAAGTTGGTGGTGTTCTGAATCCGTATCAGCTGACCGATCAGTTTACCAGCTTTGCAAAAATGGGCACCCA
GAGCGGATTTCTGTTTTATGTTCCGGCACCGTATACGAGCAAAATTGATCCGCTGACCGGTTTTGTTGATCCGT
TTGTTTGGAAAACCATCAAAAACCATGAAAGCCGCAAACATTTTCTGGAAGGTTTCGATTTTCTGCATTACGAC
GTTAAAACGGGTGATTTCATCCTGCACTTTAAAATGAATCGCAATCTGAGTTTTCAGCGTGGCCTGCCTGGTTT
TATGCCTGCATGGGATATTGTGTTTGAGAAAAACGAAACACAGTTCGATGCAAAAGGCACCCCGTTTATTGCA
GGTAAACGTATTGTTCCGGTGATTGAAAATCATCGTTTCACCGGTCGTTATCGCGATCTGTATCCGGCAAATG
AACTGATCGCACTGCTGGAAGAGAAAGGTATTGTTTTTCGTGATGGCTCAAACATTCTGCCGAAACTGCTGGA
AAATGATGATAGCCATGCAATTGATACCATGGTTGCACTGATTCGTAGCGTTCTGCAGATGCGTAATAGCAAT
GCAGCAACCGGTGAAGATTACATTAATAGTCCGGTTCGTGATCTGAATGGTGTTTGTTTTGATAGCCGTTTTCA
GAATCCGGAATGGCCGATGGATGCAGATGCAAATGGTGCATATCATATTGCACTGAAAGGACAGCTGCTGCT
GAACCACCTGAAAGAAAGCAAAGATCTGAAACTGCAAAACGGCATTAGCAATCAGGATTGGCTGGCATATAT
CCAAGAACTGCGTAACGGTCGTAGCAGTGATGATGAAGCAACCGCAGATAGCCAGCATGCAGCACCGCCTAA
AAAGAAACGTAAAGTTGGTGGTAGCGGTGGTTCAGGTGGTAGTGGCGGTAGTGGTGGCTCAGGGGGTTCTG
GTGGCTCTGGTGGTAGCCTCGAGCACCACCACCACCACCACTGA
SEQ ID NO.: 10
ATGACCCAGTTTGAAGGTTTCACCAATCTGTATCAGGTTAGCAAAACCCTGCGTTTTGAACT
GATTCCGCAGGGTAAAACCCTGAAACATATTCAAGAACAGGGCTTCATCGAAGAGGATAAAGCACGTAACGA
TCACTACAAAGAACTGAAACCGATTATCGACCGCATCTATAAAACCTATGCAGATCAGTGTCTGCAGCTGGTT
CAGCTGGATTGGGAAAATCTGAGCGCAGCAATTGATAGTTATCGCAAAGAAAAAACCGAAGAAACCCGTAAT
GCACTGATTGAAGAACAGGCAACCTATCGTAATGCCATCCATGATTATTTCATTGGTCGTACCGATAATCTGAC
CGATGCAATTAACAAACGTCACGCCGAAATCTATAAAGGCCTGTTTAAAGCCGAACTGTTTAATGGCAAAGTT
CTGAAACAGCTGGGCACCGTTACCACCACCGAACATGAAAATGCACTGCTGCGTAGCTTTGATAAATTCACCA
CCTATTTCAGCGGCTTTTATGAGAATCGCAAAAACGTGTTTAGCGCAGAAGATATTAGCACCGCAATTCCGCA
TCGTATTGTGCAGGATAATTTCCCGAAATTCAAAGAGAACTGCCACATTTTTACCCGTCTGATTACCGCAGTTC
CGAGCCTGCGTGAACATTTTGAAAACGTTAAAAAAGCCATCGGCATCTTTGTTAGCACCAGCATTGAAGAAGT
TTTTAGCTTCCCGTTTTACAATCAGCTGCTGACCCAGACCCAGATTGATCTGTATAACCAACTGCTGGGTGGTA
TTAGCCGTGAAGCAGGCACCGAAAAAATCAAAGGTCTGAATGAAGTGCTGAATCTGGCCATTCAGAAAAATG
ATGAAACCGCACATATTATTGCAAGCCTGCCGCATCGTTTTATTCCGCTGTTCAAACAAATTCTGAGCGATCGT
AATACCCTGAGCTTTATTCTGGAAGAATTCAAATCCGATGAAGAGGTGATTCAGAGCTTTTGCAAATACAAAA
CGCTGCTGCGCAATGAAAATGTTCTGGAAACTGCCGAAGCACTGTTTAACGAACTGAATAGCATTGATCTGAC
CCACATCTTTATCAGCCACAAAAAACTGGAAACCATTTCAAGCGCACTGTGTGATCATTGGGATACCCTGCGTA
ATGCCCTGTATGAACGTCGTATTAGCGAACTGACCGGTAAAATTACCAAAAGCGCGAAAGAAAAAGTTCAGC
GCAGTCTGAAACATGAGGATATTAATCTGCAAGAGATTATTAGCGCAGCCGGTAAAGAACTGTCAGAAGCAT
TTAAACAGAAAACCAGCGAAATTCTGTCACATGCACATGCAGCACTGGATCAGCCGCTGCCGACCACCCTGAA
AAAACAAGAAGAAAAAGAAATCCTGAAAAGCCAGCTGGATAGCCTGCTGGGTCTGTATCATCTGCTGGACTG
GTTTGCAGTTGATGAAAGCAATGAAGTTGATCCGGAATTTAGCGCACGTCTGACCGGCATTAAACTGGAAAT
GGAACCGAGCCTGAGCTTTTATAACAAAGCCCGTAATTATGCCACCAAAAAACCGTATAGCGTCGAAAAATTC
AAACTGAACTTTCAGATGCCGACCCTGGCAAGCGGTTGGGATGTTAATAAAGAAAAAAACAACGGTGCCATC
CTGTTCGTGAAAAATGGCCTGTATTATCTGGGTATTATGCCGAAACAGAAAGGTCGTTATAAAGCGCTGAGCT
TTGAACCGACGGAAAAAACCAGTGAAGGTTTTGATAAAATGTACTACGACTATTTTCCGGATGCAGCCAAAAT
GATTCCGAAATGTAGCACCCAGCTGAAAGCAGTTACCGCACATTTTCAGACCCATACCACCCCGATTCTGCTGA
GCAATAACTTTATTGAACCGCTGGAAATCACCAAAGAGATCTACGATCTGAATAACCCGGAAAAAGAGCCGA
AAAAATTCCAGACCGCATATGCAAAAAAAACCGGTGATCAGAAAGGTTATCGTGAAGCGCTGTGTAAATGGA
TTGATTTCACCCGTGATTTTCTGAGCAAATACACCAAAACCACCAGTATCGATCTGAGCAGCCTGCGTCCGAGC
AGCCAGTATAAAGATCTGGGCGAATATTATGCAGAACTGAATCCGCTGCTGTATCATATTAGCTTTCAGCGTA
TTGCCGAGAAAGAAATCATGGACGCAGTTGAAACCGGTAAACTGTACCTGTTCCAGATCTACAATAAAGATTT
TGCCAAAGGCCATCATGGCAAACCGAATCTGCATACCCTGTATTGGACCGGTCTGTTTAGCCCTGAAAATCTG
GCAAAAACCTCGATTAAACTGAATGGTCAGGCGGAACTGTTTTATCGTCCGAAAAGCCGTATGAAACGTATG
GCACATCGTCTGGGTGAAAAAATGCTGAACAAAAAACTGAAAGACCAGAAAACCCCGATCCCGGATACACTG
TATCAAGAACTGTATGATTATGTGAACCATCGTCTGAGCCATGATCTGAGTGATGAAGCACGTGCCCTGCTGC
CGAATGTTATTACCAAAGAAGTTAGCCACGAGATCATTAAAGATCGTCGTTTTACCAGCGACAAATTCTTTTTT
CATGTGCCGATTACCCTGAATTATCAGGCAGCAAATAGCCCGAGCAAATTTAACCAGCGTGTTAATGCATATC
TGAAAGAACATCCAGAAACGCCGATTATTGGTATTGATCGTGGTGAACGTAACCTGATTTATATCACCGTTATT
GATAGCACCGGCAAAATCCTGGAACAGCGTAGCCTGAATACCATTCAGCAGTTTGATTACCAGAAAAAACTG
GATAATCGCGAGAAAGAACGTGTTGCAGCACGTCAGGCATGGTCAGTTGTTGGTACAATTAAAGACCTGAAA
CAGGGTTATCTGAGCCAGGTTATTCATGAAATTGTGGATCTGATGATTCACTATCAGGCCGTTGTTGTGCTGG
AAAACCTGAATTTTGGCTTTAAAAGCAAACGTACCGGCATTGCAGAAAAAGCAGTTTATCAGCAGTTCGAGAA
AATGCTGATTGACAAACTGAATTGCCTGGTGCTGAAAGATTATCCGGCTGAAAAAGTTGGTGGTGTTCTGAAT
CCGTATCAGCTGACCGATCAGTTTACCAGCTTTGCAAAAATGGGCACCCAGAGCGGATTTCTGTTTTATGTTCC
GGCACCGTATACGAGCAAAATTGATCCGCTGACCGGTTTTGTTGATCCGTTTGTTTGGAAAACCATCAAAAAC
CATGAAAGCCGCAAACATTTTCTGGAAGGTTTCGATTTTCTGCATTACGACGTTAAAACGGGTGATTTCATCCT
GCACTTTAAAATGAATCGCAATCTGAGTTTTCAGCGTGGCCTGCCTGGTTTTATGCCTGCATGGGATATTGTGT
TTGAGAAAAACGAAACACAGTTCGATGCAAAAGGCACCCCGTTTATTGCAGGTAAACGTATTGTTCCGGTGAT
TGAAAATCATCGTTTCACCGGTCGTTATCGCGATCTGTATCCGGCAAATGAACTGATCGCACTGCTGGAAGAG
AAAGGTATTGTTTTTCGTGATGGCTCAAACATTCTGCCGAAACTGCTGGAAAATGATGATAGCCATGCAATTG
ATACCATGGTTGCACTGATTCGTAGCGTTCTGCAGATGCGTAATAGCAATGCAGCAACCGGTGAAGATTACAT
TAATAGTCCGGTTCGTGATCTGAATGGTGTTTGTTTTGATAGCCGTTTTCAGAATCCGGAATGGCCGATGGAT
GCAGATGCAAATGGTGCATATCATATTGCACTGAAAGGACAGCTGCTGCTGAACCACCTGAAAGAAAGCAAA
GATCTGAAACTGCAAAACGGCATTAGCAATCAGGATTGGCTGGCATATATCCAAGAACTGCGTAACGGTCGT
AGCAGTGATGATGAAGCAACCGCAGATAGCCAGCATGCAGCACCGCCTAAAAAGAAACGTAAAGTTGGTGG
TAGCGGTGGTTCAGGTGGTAGTGGCGGTAGTGGTGGCTCAGGGGGTTCTGGTGGCTCTGGTGGTAGCCTCG
AGCACCACCACCACCACCACTGA
SEQ ID NO.: 11
ATGGGCAGCAGCAGCAGCGGCCTGGTGCCGCGCGGCAGCCATATGGCTAGCATGACTGGT
GGACAGCAAATGGGTCGGGATCCAACCCAGTTTGAAGGTTTCACCAATCTGTATCAGGTTAGCAAAACCCTGC
GTTTTGAACTGATTCCGCAGGGTAAAACCCTGAAACATATTCAAGAACAGGGCTTCATCGAAGAGGATAAAG
CACGTAACGATCACTACAAAGAACTGAAACCGATTATCGACCGCATCTATAAAACCTATGCAGATCAGTGTCT
GCAGCTGGTTCAGCTGGATTGGGAAAATCTGAGCGCAGCAATTGATAGTTATCGCAAAGAAAAAACCGAAGA
AACCCGTAATGCACTGATTGAAGAACAGGCAACCTATCGTAATGCCATCCATGATTATTTCATTGGTCGTACCG
ATAATCTGACCGATGCAATTAACAAACGTCACGCCGAAATCTATAAAGGCCTGTTTAAAGCCGAACTGTTTAA
TGGCAAAGTTCTGAAACAGCTGGGCACCGTTACCACCACCGAACATGAAAATGCACTGCTGCGTAGCTTTGAT
AAATTCACCACCTATTTCAGCGGCTTTTATGAGAATCGCAAAAACGTGTTTAGCGCAGAAGATATTAGCACCG
CAATTCCGCATCGTATTGTGCAGGATAATTTCCCGAAATTCAAAGAGAACTGCCACATTTTTACCCGTCTGATT
ACCGCAGTTCCGAGCCTGCGTGAACATTTTGAAAACGTTAAAAAAGCCATCGGCATCTTTGTTAGCACCAGCA
TTGAAGAAGTTTTTAGCTTCCCGTTTTACAATCAGCTGCTGACCCAGACCCAGATTGATCTGTATAACCAACTG
CTGGGTGGTATTAGCCGTGAAGCAGGCACCGAAAAAATCAAAGGTCTGAATGAAGTGCTGAATCTGGCCATT
CAGAAAAATGATGAAACCGCACATATTATTGCAAGCCTGCCGCATCGTTTTATTCCGCTGTTCAAACAAATTCT
GAGCGATCGTAATACCCTGAGCTTTATTCTGGAAGAATTCAAATCCGATGAAGAGGTGATTCAGAGCTTTTGC
AAATACAAAACGCTGCTGCGCAATGAAAATGTTCTGGAAACTGCCGAAGCACTGTTTAACGAACTGAATAGCA
TTGATCTGACCCACATCTTTATCAGCCACAAAAAACTGGAAACCATTTCAAGCGCACTGTGTGATCATTGGGAT
ACCCTGCGTAATGCCCTGTATGAACGTCGTATTAGCGAACTGACCGGTAAAATTACCAAAAGCGCGAAAGAA
AAAGTTCAGCGCAGTCTGAAACATGAGGATATTAATCTGCAAGAGATTATTAGCGCAGCCGGTAAAGAACTG
TCAGAAGCATTTAAACAGAAAACCAGCGAAATTCTGTCACATGCACATGCAGCACTGGATCAGCCGCTGCCGA
CCACCCTGAAAAAACAAGAAGAAAAAGAAATCCTGAAAAGCCAGCTGGATAGCCTGCTGGGTCTGTATCATC
TGCTGGACTGGTTTGCAGTTGATGAAAGCAATGAAGTTGATCCGGAATTTAGCGCACGTCTGACCGGCATTAA
ACTGGAAATGGAACCGAGCCTGAGCTTTTATAACAAAGCCCGTAATTATGCCACCAAAAAACCGTATAGCGTC
GAAAAATTCAAACTGAACTTTCAGATGCCGACCCTGGCAAGCGGTTGGGATGTTAATAAAGAAAAAAACAAC
GGTGCCATCCTGTTCGTGAAAAATGGCCTGTATTATCTGGGTATTATGCCGAAACAGAAAGGTCGTTATAAAG
CGCTGAGCTTTGAACCGACGGAAAAAACCAGTGAAGGTTTTGATAAAATGTACTACGACTATTTTCCGGATGC
AGCCAAAATGATTCCGAAATGTAGCACCCAGCTGAAAGCAGTTACCGCACATTTTCAGACCCATACCACCCCG
ATTCTGCTGAGCAATAACTTTATTGAACCGCTGGAAATCACCAAAGAGATCTACGATCTGAATAACCCGGAAA
AAGAGCCGAAAAAATTCCAGACCGCATATGCAAAAAAAACCGGTGATCAGAAAGGTTATCGTGAAGCGCTGT
GTAAATGGATTGATTTCACCCGTGATTTTCTGAGCAAATACACCAAAACCACCAGTATCGATCTGAGCAGCCT
GCGTCCGAGCAGCCAGTATAAAGATCTGGGCGAATATTATGCAGAACTGAATCCGCTGCTGTATCATATTAGC
TTTCAGCGTATTGCCGAGAAAGAAATCATGGACGCAGTTGAAACCGGTAAACTGTACCTGTTCCAGATCTACA
ATAAAGATTTTGCCAAAGGCCATCATGGCAAACCGAATCTGCATACCCTGTATTGGACCGGTCTGTTTAGCCCT
GAAAATCTGGCAAAAACCTCGATTAAACTGAATGGTCAGGCGGAACTGTTTTATCGTCCGAAAAGCCGTATGA
AACGTATGGCACATCGTCTGGGTGAAAAAATGCTGAACAAAAAACTGAAAGACCAGAAAACCCCGATCCCGG
ATACACTGTATCAAGAACTGTATGATTATGTGAACCATCGTCTGAGCCATGATCTGAGTGATGAAGCACGTGC
CCTGCTGCCGAATGTTATTACCAAAGAAGTTAGCCACGAGATCATTAAAGATCGTCGTTTTACCAGCGACAAA
TTCTTTTTTCATGTGCCGATTACCCTGAATTATCAGGCAGCAAATAGCCCGAGCAAATTTAACCAGCGTGTTAA
TGCATATCTGAAAGAACATCCAGAAACGCCGATTATTGGTATTGATCGTGGTGAACGTAACCTGATTTATATC
ACCGTTATTGATAGCACCGGCAAAATCCTGGAACAGCGTAGCCTGAATACCATTCAGCAGTTTGATTACCAGA
AAAAACTGGATAATCGCGAGAAAGAACGTGTTGCAGCACGTCAGGCATGGTCAGTTGTTGGTACAATTAAAG
ACCTGAAACAGGGTTATCTGAGCCAGGTTATTCATGAAATTGTGGATCTGATGATTCACTATCAGGCCGTTGT
TGTGCTGGAAAACCTGAATTTTGGCTTTAAAAGCAAACGTACCGGCATTGCAGAAAAAGCAGTTTATCAGCAG
TTCGAGAAAATGCTGATTGACAAACTGAATTGCCTGGTGCTGAAAGATTATCCGGCTGAAAAAGTTGGTGGT
GTTCTGAATCCGTATCAGCTGACCGATCAGTTTACCAGCTTTGCAAAAATGGGCACCCAGAGCGGATTTCTGTT
TTATGTTCCGGCACCGTATACGAGCAAAATTGATCCGCTGACCGGTTTTGTTGATCCGTTTGTTTGGAAAACCA
TCAAAAACCATGAAAGCCGCAAACATTTTCTGGAAGGTTTCGATTTTCTGCATTACGACGTTAAAACGGGTGA
TTTCATCCTGCACTTTAAAATGAATCGCAATCTGAGTTTTCAGCGTGGCCTGCCTGGTTTTATGCCTGCATGGG
ATATTGTGTTTGAGAAAAACGAAACACAGTTCGATGCAAAAGGCACCCCGTTTATTGCAGGTAAACGTATTGT
TCCGGTGATTGAAAATCATCGTTTCACCGGTCGTTATCGCGATCTGTATCCGGCAAATGAACTGATCGCACTGC
TGGAAGAGAAAGGTATTGTTTTTCGTGATGGCTCAAACATTCTGCCGAAACTGCTGGAAAATGATGATAGCCA
TGCAATTGATACCATGGTTGCACTGATTCGTAGCGTTCTGCAGATGCGTAATAGCAATGCAGCAACCGGTGAA
GATTACATTAATAGTCCGGTTCGTGATCTGAATGGTGTTTGTTTTGATAGCCGTTTTCAGAATCCGGAATGGCC
GATGGATGCAGATGCAAATGGTGCATATCATATTGCACTGAAAGGACAGCTGCTGCTGAACCACCTGAAAGA
AAGCAAAGATCTGAAACTGCAAAACGGCATTAGCAATCAGGATTGGCTGGCATATATCCAAGAACTGCGTAA
CGGTCGTAGCAGTGATGATGAAGCAACCGCAGATAGCCAGCATGCAGCACCGCCTAAAAAGAAACGTAAAGT
TGGTGGTAGCGGTGGTTCAGGTGGTAGTGGCGGTAGTGGTGGCTCAGGGGGTTCTGGTGGCTCTGGTGGTA
GCCTCGAGCACCACCACCACCACCACTGA
SEQ ID NO.: 12
ATGCCGCCTCCGAAACGTCCGCGTCTGGATGGTATCCACGGAGTCCCAGCAGCCACCCAGT
TTGAAGGTTTCACCAATCTGTATCAGGTTAGCAAAACCCTGCGTTTTGAACTGATTCCGCAGGGTAAAACCCTG
AAACATATTCAAGAACAGGGCTTCATCGAAGAGGATAAAGCACGTAACGATCACTACAAAGAACTGAAACCG
ATTATCGACCGCATCTATAAAACCTATGCAGATCAGTGTCTGCAGCTGGTTCAGCTGGATTGGGAAAATCTGA
GCGCAGCAATTGATAGTTATCGCAAAGAAAAAACCGAAGAAACCCGTAATGCACTGATTGAAGAACAGGCAA
CCTATCGTAATGCCATCCATGATTATTTCATTGGTCGTACCGATAATCTGACCGATGCAATTAACAAACGTCAC
GCCGAAATCTATAAAGGCCTGTTTAAAGCCGAACTGTTTAATGGCAAAGTTCTGAAACAGCTGGGCACCGTTA
CCACCACCGAACATGAAAATGCACTGCTGCGTAGCTTTGATAAATTCACCACCTATTTCAGCGGCTTTTATGAG
AATCGCAAAAACGTGTTTAGCGCAGAAGATATTAGCACCGCAATTCCGCATCGTATTGTGCAGGATAATTTCC
CGAAATTCAAAGAGAACTGCCACATTTTTACCCGTCTGATTACCGCAGTTCCGAGCCTGCGTGAACATTTTGAA
AACGTTAAAAAAGCCATCGGCATCTTTGTTAGCACCAGCATTGAAGAAGTTTTTAGCTTCCCGTTTTACAATCA
GCTGCTGACCCAGACCCAGATTGATCTGTATAACCAACTGCTGGGTGGTATTAGCCGTGAAGCAGGCACCGA
AAAAATCAAAGGTCTGAATGAAGTGCTGAATCTGGCCATTCAGAAAAATGATGAAACCGCACATATTATTGCA
AGCCTGCCGCATCGTTTTATTCCGCTGTTCAAACAAATTCTGAGCGATCGTAATACCCTGAGCTTTATTCTGGA
AGAATTCAAATCCGATGAAGAGGTGATTCAGAGCTTTTGCAAATACAAAACGCTGCTGCGCAATGAAAATGTT
CTGGAAACTGCCGAAGCACTGTTTAACGAACTGAATAGCATTGATCTGACCCACATCTTTATCAGCCACAAAA
AACTGGAAACCATTTCAAGCGCACTGTGTGATCATTGGGATACCCTGCGTAATGCCCTGTATGAACGTCGTAT
TAGCGAACTGACCGGTAAAATTACCAAAAGCGCGAAAGAAAAAGTTCAGCGCAGTCTGAAACATGAGGATAT
TAATCTGCAAGAGATTATTAGCGCAGCCGGTAAAGAACTGTCAGAAGCATTTAAACAGAAAACCAGCGAAAT
TCTGTCACATGCACATGCAGCACTGGATCAGCCGCTGCCGACCACCCTGAAAAAACAAGAAGAAAAAGAAAT
CCTGAAAAGCCAGCTGGATAGCCTGCTGGGTCTGTATCATCTGCTGGACTGGTTTGCAGTTGATGAAAGCAAT
GAAGTTGATCCGGAATTTAGCGCACGTCTGACCGGCATTAAACTGGAAATGGAACCGAGCCTGAGCTTTTATA
ACAAAGCCCGTAATTATGCCACCAAAAAACCGTATAGCGTCGAAAAATTCAAACTGAACTTTCAGATGCCGAC
CCTGGCAAGCGGTTGGGATGTTAATAAAGAAAAAAACAACGGTGCCATCCTGTTCGTGAAAAATGGCCTGTA
TTATCTGGGTATTATGCCGAAACAGAAAGGTCGTTATAAAGCGCTGAGCTTTGAACCGACGGAAAAAACCAG
TGAAGGTTTTGATAAAATGTACTACGACTATTTTCCGGATGCAGCCAAAATGATTCCGAAATGTAGCACCCAG
CTGAAAGCAGTTACCGCACATTTTCAGACCCATACCACCCCGATTCTGCTGAGCAATAACTTTATTGAACCGCT
GGAAATCACCAAAGAGATCTACGATCTGAATAACCCGGAAAAAGAGCCGAAAAAATTCCAGACCGCATATGC
AAAAAAAACCGGTGATCAGAAAGGTTATCGTGAAGCGCTGTGTAAATGGATTGATTTCACCCGTGATTTTCTG
AGCAAATACACCAAAACCACCAGTATCGATCTGAGCAGCCTGCGTCCGAGCAGCCAGTATAAAGATCTGGGC
GAATATTATGCAGAACTGAATCCGCTGCTGTATCATATTAGCTTTCAGCGTATTGCCGAGAAAGAAATCATGG
ACGCAGTTGAAACCGGTAAACTGTACCTGTTCCAGATCTACAATAAAGATTTTGCCAAAGGCCATCATGGCAA
ACCGAATCTGCATACCCTGTATTGGACCGGTCTGTTTAGCCCTGAAAATCTGGCAAAAACCTCGATTAAACTGA
ATGGTCAGGCGGAACTGTTTTATCGTCCGAAAAGCCGTATGAAACGTATGGCACATCGTCTGGGTGAAAAAA
TGCTGAACAAAAAACTGAAAGACCAGAAAACCCCGATCCCGGATACACTGTATCAAGAACTGTATGATTATGT
GAACCATCGTCTGAGCCATGATCTGAGTGATGAAGCACGTGCCCTGCTGCCGAATGTTATTACCAAAGAAGTT
AGCCACGAGATCATTAAAGATCGTCGTTTTACCAGCGACAAATTCTTTTTTCATGTGCCGATTACCCTGAATTAT
CAGGCAGCAAATAGCCCGAGCAAATTTAACCAGCGTGTTAATGCATATCTGAAAGAACATCCAGAAACGCCG
ATTATTGGTATTGATCGTGGTGAACGTAACCTGATTTATATCACCGTTATTGATAGCACCGGCAAAATCCTGGA
ACAGCGTAGCCTGAATACCATTCAGCAGTTTGATTACCAGAAAAAACTGGATAATCGCGAGAAAGAACGTGT
TGCAGCACGTCAGGCATGGTCAGTTGTTGGTACAATTAAAGACCTGAAACAGGGTTATCTGAGCCAGGTTATT
CATGAAATTGTGGATCTGATGATTCACTATCAGGCCGTTGTTGTGCTGGAAAACCTGAATTTTGGCTTTAAAA
GCAAACGTACCGGCATTGCAGAAAAAGCAGTTTATCAGCAGTTCGAGAAAATGCTGATTGACAAACTGAATT
GCCTGGTGCTGAAAGATTATCCGGCTGAAAAAGTTGGTGGTGTTCTGAATCCGTATCAGCTGACCGATCAGTT
TACCAGCTTTGCAAAAATGGGCACCCAGAGCGGATTTCTGTTTTATGTTCCGGCACCGTATACGAGCAAAATT
GATCCGCTGACCGGTTTTGTTGATCCGTTTGTTTGGAAAACCATCAAAAACCATGAAAGCCGCAAACATTTTCT
GGAAGGTTTCGATTTTCTGCATTACGACGTTAAAACGGGTGATTTCATCCTGCACTTTAAAATGAATCGCAATC
TGAGTTTTCAGCGTGGCCTGCCTGGTTTTATGCCTGCATGGGATATTGTGTTTGAGAAAAACGAAACACAGTT
CGATGCAAAAGGCACCCCGTTTATTGCAGGTAAACGTATTGTTCCGGTGATTGAAAATCATCGTTTCACCGGT
CGTTATCGCGATCTGTATCCGGCAAATGAACTGATCGCACTGCTGGAAGAGAAAGGTATTGTTTTTCGTGATG
GCTCAAACATTCTGCCGAAACTGCTGGAAAATGATGATAGCCATGCAATTGATACCATGGTTGCACTGATTCG
TAGCGTTCTGCAGATGCGTAATAGCAATGCAGCAACCGGTGAAGATTACATTAATAGTCCGGTTCGTGATCTG
AATGGTGTTTGTTTTGATAGCCGTTTTCAGAATCCGGAATGGCCGATGGATGCAGATGCAAATGGTGCATATC
ATATTGCACTGAAAGGACAGCTGCTGCTGAACCACCTGAAAGAAAGCAAAGATCTGAAACTGCAAAACGGCA
TTAGCAATCAGGATTGGCTGGCATATATCCAAGAACTGCGTAACGGTCGTAGCAGTGATGATGAAGCAACCG
CAGATAGCCAGCATGCAGCACCGCCTAAAAAGAAACGTAAAGTTGGTGGTAGCGGTGGTTCAGGTGGTAGT
GGCGGTAGTGGTGGCTCAGGGGGTTCTGGTGGCTCTGGTGGTAGCCTCGAGCACCACCACCACCACCACTGA
SEQ ID NO.: 13
ATGAGCAGTGATGATGAAGCAACCGCAGATAGCCAGCATGCAGCACCGCCTAAAAAGAAA
CGTAAAGTTGGTATCCACGGAGTCCCAGCAGCCACCCAGTTTGAAGGTTTCACCAATCTGTATCAGGTTAGCA
AAACCCTGCGTTTTGAACTGATTCCGCAGGGTAAAACCCTGAAACATATTCAAGAACAGGGCTTCATCGAAGA
GGATAAAGCACGTAACGATCACTACAAAGAACTGAAACCGATTATCGACCGCATCTATAAAACCTATGCAGAT
CAGTGTCTGCAGCTGGTTCAGCTGGATTGGGAAAATCTGAGCGCAGCAATTGATAGTTATCGCAAAGAAAAA
ACCGAAGAAACCCGTAATGCACTGATTGAAGAACAGGCAACCTATCGTAATGCCATCCATGATTATTTCATTG
GTCGTACCGATAATCTGACCGATGCAATTAACAAACGTCACGCCGAAATCTATAAAGGCCTGTTTAAAGCCGA
ACTGTTTAATGGCAAAGTTCTGAAACAGCTGGGCACCGTTACCACCACCGAACATGAAAATGCACTGCTGCGT
AGCTTTGATAAATTCACCACCTATTTCAGCGGCTTTTATGAGAATCGCAAAAACGTGTTTAGCGCAGAAGATAT
TAGCACCGCAATTCCGCATCGTATTGTGCAGGATAATTTCCCGAAATTCAAAGAGAACTGCCACATTTTTACCC
GTCTGATTACCGCAGTTCCGAGCCTGCGTGAACATTTTGAAAACGTTAAAAAAGCCATCGGCATCTTTGTTAGC
ACCAGCATTGAAGAAGTTTTTAGCTTCCCGTTTTACAATCAGCTGCTGACCCAGACCCAGATTGATCTGTATAA
CCAACTGCTGGGTGGTATTAGCCGTGAAGCAGGCACCGAAAAAATCAAAGGTCTGAATGAAGTGCTGAATCT
GGCCATTCAGAAAAATGATGAAACCGCACATATTATTGCAAGCCTGCCGCATCGTTTTATTCCGCTGTTCAAAC
AAATTCTGAGCGATCGTAATACCCTGAGCTTTATTCTGGAAGAATTCAAATCCGATGAAGAGGTGATTCAGAG
CTTTTGCAAATACAAAACGCTGCTGCGCAATGAAAATGTTCTGGAAACTGCCGAAGCACTGTTTAACGAACTG
AATAGCATTGATCTGACCCACATCTTTATCAGCCACAAAAAACTGGAAACCATTTCAAGCGCACTGTGTGATCA
TTGGGATACCCTGCGTAATGCCCTGTATGAACGTCGTATTAGCGAACTGACCGGTAAAATTACCAAAAGCGCG
AAAGAAAAAGTTCAGCGCAGTCTGAAACATGAGGATATTAATCTGCAAGAGATTATTAGCGCAGCCGGTAAA
GAACTGTCAGAAGCATTTAAACAGAAAACCAGCGAAATTCTGTCACATGCACATGCAGCACTGGATCAGCCGC
TGCCGACCACCCTGAAAAAACAAGAAGAAAAAGAAATCCTGAAAAGCCAGCTGGATAGCCTGCTGGGTCTGT
ATCATCTGCTGGACTGGTTTGCAGTTGATGAAAGCAATGAAGTTGATCCGGAATTTAGCGCACGTCTGACCGG
CATTAAACTGGAAATGGAACCGAGCCTGAGCTTTTATAACAAAGCCCGTAATTATGCCACCAAAAAACCGTAT
AGCGTCGAAAAATTCAAACTGAACTTTCAGATGCCGACCCTGGCAAGCGGTTGGGATGTTAATAAAGAAAAA
AACAACGGTGCCATCCTGTTCGTGAAAAATGGCCTGTATTATCTGGGTATTATGCCGAAACAGAAAGGTCGTT
ATAAAGCGCTGAGCTTTGAACCGACGGAAAAAACCAGTGAAGGTTTTGATAAAATGTACTACGACTATTTTCC
GGATGCAGCCAAAATGATTCCGAAATGTAGCACCCAGCTGAAAGCAGTTACCGCACATTTTCAGACCCATACC
ACCCCGATTCTGCTGAGCAATAACTTTATTGAACCGCTGGAAATCACCAAAGAGATCTACGATCTGAATAACC
CGGAAAAAGAGCCGAAAAAATTCCAGACCGCATATGCAAAAAAAACCGGTGATCAGAAAGGTTATCGTGAA
GCGCTGTGTAAATGGATTGATTTCACCCGTGATTTTCTGAGCAAATACACCAAAACCACCAGTATCGATCTGA
GCAGCCTGCGTCCGAGCAGCCAGTATAAAGATCTGGGCGAATATTATGCAGAACTGAATCCGCTGCTGTATCA
TATTAGCTTTCAGCGTATTGCCGAGAAAGAAATCATGGACGCAGTTGAAACCGGTAAACTGTACCTGTTCCAG
ATCTACAATAAAGATTTTGCCAAAGGCCATCATGGCAAACCGAATCTGCATACCCTGTATTGGACCGGTCTGTT
TAGCCCTGAAAATCTGGCAAAAACCTCGATTAAACTGAATGGTCAGGCGGAACTGTTTTATCGTCCGAAAAGC
CGTATGAAACGTATGGCACATCGTCTGGGTGAAAAAATGCTGAACAAAAAACTGAAAGACCAGAAAACCCCG
ATCCCGGATACACTGTATCAAGAACTGTATGATTATGTGAACCATCGTCTGAGCCATGATCTGAGTGATGAAG
CACGTGCCCTGCTGCCGAATGTTATTACCAAAGAAGTTAGCCACGAGATCATTAAAGATCGTCGTTTTACCAG
CGACAAATTCTTTTTTCATGTGCCGATTACCCTGAATTATCAGGCAGCAAATAGCCCGAGCAAATTTAACCAGC
GTGTTAATGCATATCTGAAAGAACATCCAGAAACGCCGATTATTGGTATTGATCGTGGTGAACGTAACCTGAT
TTATATCACCGTTATTGATAGCACCGGCAAAATCCTGGAACAGCGTAGCCTGAATACCATTCAGCAGTTTGATT
ACCAGAAAAAACTGGATAATCGCGAGAAAGAACGTGTTGCAGCACGTCAGGCATGGTCAGTTGTTGGTACAA
TTAAAGACCTGAAACAGGGTTATCTGAGCCAGGTTATTCATGAAATTGTGGATCTGATGATTCACTATCAGGC
CGTTGTTGTGCTGGAAAACCTGAATTTTGGCTTTAAAAGCAAACGTACCGGCATTGCAGAAAAAGCAGTTTAT
CAGCAGTTCGAGAAAATGCTGATTGACAAACTGAATTGCCTGGTGCTGAAAGATTATCCGGCTGAAAAAGTT
GGTGGTGTTCTGAATCCGTATCAGCTGACCGATCAGTTTACCAGCTTTGCAAAAATGGGCACCCAGAGCGGAT
TTCTGTTTTATGTTCCGGCACCGTATACGAGCAAAATTGATCCGCTGACCGGTTTTGTTGATCCGTTTGTTTGG
AAAACCATCAAAAACCATGAAAGCCGCAAACATTTTCTGGAAGGTTTCGATTTTCTGCATTACGACGTTAAAAC
GGGTGATTTCATCCTGCACTTTAAAATGAATCGCAATCTGAGTTTTCAGCGTGGCCTGCCTGGTTTTATGCCTG
CATGGGATATTGTGTTTGAGAAAAACGAAACACAGTTCGATGCAAAAGGCACCCCGTTTATTGCAGGTAAAC
GTATTGTTCCGGTGATTGAAAATCATCGTTTCACCGGTCGTTATCGCGATCTGTATCCGGCAAATGAACTGATC
GCACTGCTGGAAGAGAAAGGTATTGTTTTTCGTGATGGCTCAAACATTCTGCCGAAACTGCTGGAAAATGATG
ATAGCCATGCAATTGATACCATGGTTGCACTGATTCGTAGCGTTCTGCAGATGCGTAATAGCAATGCAGCAAC
CGGTGAAGATTACATTAATAGTCCGGTTCGTGATCTGAATGGTGTTTGTTTTGATAGCCGTTTTCAGAATCCGG
AATGGCCGATGGATGCAGATGCAAATGGTGCATATCATATTGCACTGAAAGGACAGCTGCTGCTGAACCACC
TGAAAGAAAGCAAAGATCTGAAACTGCAAAACGGCATTAGCAATCAGGATTGGCTGGCATATATCCAAGAAC
TGCGTAACGGTCGTAGCAGTGATGATGAAGCAACCGCAGATAGCCAGCATGCAGCACCGCCTAAAAAGAAAC
GTAAAGTTGGTGGTAGCGGTGGTTCAGGTGGTAGTGGCGGTAGTGGTGGCTCAGGGGGTTCTGGTGGCTCT
GGTGGTAGCCTCGAGCACCACCACCACCACCACTGA
SEQ ID NO.: 14
ATGACCCAGTTTGAAGGTTTCACCAATCTGTATCAGGTTAGCAAAACCCTGCGTTTTGAACT
GATTCCGCAGGGTAAAACCCTGAAACATATTCAAGAACAGGGCTTCATCGAAGAGGATAAAGCACGTAACGA
TCACTACAAAGAACTGAAACCGATTATCGACCGCATCTATAAAACCTATGCAGATCAGTGTCTGCAGCTGGTT
CAGCTGGATTGGGAAAATCTGAGCGCAGCAATTGATAGTTATCGCAAAGAAAAAACCGAAGAAACCCGTAAT
GCACTGATTGAAGAACAGGCAACCTATCGTAATGCCATCCATGATTATTTCATTGGTCGTACCGATAATCTGAC
CGATGCAATTAACAAACGTCACGCCGAAATCTATAAAGGCCTGTTTAAAGCCGAACTGTTTAATGGCAAAGTT
CTGAAACAGCTGGGCACCGTTACCACCACCGAACATGAAAATGCACTGCTGCGTAGCTTTGATAAATTCACCA
CCTATTTCAGCGGCTTTTATGAGAATCGCAAAAACGTGTTTAGCGCAGAAGATATTAGCACCGCAATTCCGCA
TCGTATTGTGCAGGATAATTTCCCGAAATTCAAAGAGAACTGCCACATTTTTACCCGTCTGATTACCGCAGTTC
CGAGCCTGCGTGAACATTTTGAAAACGTTAAAAAAGCCATCGGCATCTTTGTTAGCACCAGCATTGAAGAAGT
TTTTAGCTTCCCGTTTTACAATCAGCTGCTGACCCAGACCCAGATTGATCTGTATAACCAACTGCTGGGTGGTA
TTAGCCGTGAAGCAGGCACCGAAAAAATCAAAGGTCTGAATGAAGTGCTGAATCTGGCCATTCAGAAAAATG
ATGAAACCGCACATATTATTGCAAGCCTGCCGCATCGTTTTATTCCGCTGTTCAAACAAATTCTGAGCGATCGT
AATACCCTGAGCTTTATTCTGGAAGAATTCAAATCCGATGAAGAGGTGATTCAGAGCTTTTGCAAATACAAAA
CGCTGCTGCGCAATGAAAATGTTCTGGAAACTGCCGAAGCACTGTTTAACGAACTGAATAGCATTGATCTGAC
CCACATCTTTATCAGCCACAAAAAACTGGAAACCATTTCAAGCGCACTGTGTGATCATTGGGATACCCTGCGTA
ATGCCCTGTATGAACGTCGTATTAGCGAACTGACCGGTAAAATTACCAAAAGCGCGAAAGAAAAAGTTCAGC
GCAGTCTGAAACATGAGGATATTAATCTGCAAGAGATTATTAGCGCAGCCGGTAAAGAACTGTCAGAAGCAT
TTAAACAGAAAACCAGCGAAATTCTGTCACATGCACATGCAGCACTGGATCAGCCGCTGCCGACCACCCTGAA
AAAACAAGAAGAAAAAGAAATCCTGAAAAGCCAGCTGGATAGCCTGCTGGGTCTGTATCATCTGCTGGACTG
GTTTGCAGTTGATGAAAGCAATGAAGTTGATCCGGAATTTAGCGCACGTCTGACCGGCATTAAACTGGAAAT
GGAACCGAGCCTGAGCTTTTATAACAAAGCCCGTAATTATGCCACCAAAAAACCGTATAGCGTCGAAAAATTC
AAACTGAACTTTCAGATGCCGACCCTGGCAAGCGGTTGGGATGTTAATAAAGAAAAAAACAACGGTGCCATC
CTGTTCGTGAAAAATGGCCTGTATTATCTGGGTATTATGCCGAAACAGAAAGGTCGTTATAAAGCGCTGAGCT
TTGAACCGACGGAAAAAACCAGTGAAGGTTTTGATAAAATGTACTACGACTATTTTCCGGATGCAGCCAAAAT
GATTCCGAAATGTAGCACCCAGCTGAAAGCAGTTACCGCACATTTTCAGACCCATACCACCCCGATTCTGCTGA
GCAATAACTTTATTGAACCGCTGGAAATCACCAAAGAGATCTACGATCTGAATAACCCGGAAAAAGAGCCGA
AAAAATTCCAGACCGCATATGCAAAAAAAACCGGTGATCAGAAAGGTTATCGTGAAGCGCTGTGTAAATGGA
TTGATTTCACCCGTGATTTTCTGAGCAAATACACCAAAACCACCAGTATCGATCTGAGCAGCCTGCGTCCGAGC
AGCCAGTATAAAGATCTGGGCGAATATTATGCAGAACTGAATCCGCTGCTGTATCATATTAGCTTTCAGCGTA
TTGCCGAGAAAGAAATCATGGACGCAGTTGAAACCGGTAAACTGTACCTGTTCCAGATCTACAATAAAGATTT
TGCCAAAGGCCATCATGGCAAACCGAATCTGCATACCCTGTATTGGACCGGTCTGTTTAGCCCTGAAAATCTG
GCAAAAACCTCGATTAAACTGAATGGTCAGGCGGAACTGTTTTATCGTCCGAAAAGCCGTATGAAACGTATG
GCACATCGTCTGGGTGAAAAAATGCTGAACAAAAAACTGAAAGACCAGAAAACCCCGATCCCGGATACACTG
TATCAAGAACTGTATGATTATGTGAACCATCGTCTGAGCCATGATCTGAGTGATGAAGCACGTGCCCTGCTGC
CGAATGTTATTACCAAAGAAGTTAGCCACGAGATCATTAAAGATCGTCGTTTTACCAGCGACAAATTCTTTTTT
CATGTGCCGATTACCCTGAATTATCAGGCAGCAAATAGCCCGAGCAAATTTAACCAGCGTGTTAATGCATATC
TGAAAGAACATCCAGAAACGCCGATTATTGGTATTGATCGTGGTGAACGTAACCTGATTTATATCACCGTTATT
GATAGCACCGGCAAAATCCTGGAACAGCGTAGCCTGAATACCATTCAGCAGTTTGATTACCAGAAAAAACTG
GATAATCGCGAGAAAGAACGTGTTGCAGCACGTCAGGCATGGTCAGTTGTTGGTACAATTAAAGACCTGAAA
CAGGGTTATCTGAGCCAGGTTATTCATGAAATTGTGGATCTGATGATTCACTATCAGGCCGTTGTTGTGCTGG
AAAACCTGAATTTTGGCTTTAAAAGCAAACGTACCGGCATTGCAGAAAAAGCAGTTTATCAGCAGTTCGAGAA
AATGCTGATTGACAAACTGAATTGCCTGGTGCTGAAAGATTATCCGGCTGAAAAAGTTGGTGGTGTTCTGAAT
CCGTATCAGCTGACCGATCAGTTTACCAGCTTTGCAAAAATGGGCACCCAGAGCGGATTTCTGTTTTATGTTCC
GGCACCGTATACGAGCAAAATTGATCCGCTGACCGGTTTTGTTGATCCGTTTGTTTGGAAAACCATCAAAAAC
CATGAAAGCCGCAAACATTTTCTGGAAGGTTTCGATTTTCTGCATTACGACGTTAAAACGGGTGATTTCATCCT
GCACTTTAAAATGAATCGCAATCTGAGTTTTCAGCGTGGCCTGCCTGGTTTTATGCCTGCATGGGATATTGTGT
TTGAGAAAAACGAAACACAGTTCGATGCAAAAGGCACCCCGTTTATTGCAGGTAAACGTATTGTTCCGGTGAT
TGAAAATCATCGTTTCACCGGTCGTTATCGCGATCTGTATCCGGCAAATGAACTGATCGCACTGCTGGAAGAG
AAAGGTATTGTTTTTCGTGATGGCTCAAACATTCTGCCGAAACTGCTGGAAAATGATGATAGCCATGCAATTG
ATACCATGGTTGCACTGATTCGTAGCGTTCTGCAGATGCGTAATAGCAATGCAGCAACCGGTGAAGATTACAT
TAATAGTCCGGTTCGTGATCTGAATGGTGTTTGTTTTGATAGCCGTTTTCAGAATCCGGAATGGCCGATGGAT
GCAGATGCAAATGGTGCATATCATATTGCACTGAAAGGACAGCTGCTGCTGAACCACCTGAAAGAAAGCAAA
GATCTGAAACTGCAAAACGGCATTAGCAATCAGGATTGGCTGGCATATATCCAAGAACTGCGTAACGGTCGT
AAACGTCCGGCAGCAACCAAAAAAGCAGGTCAGGCAAAAAAGAAAAAAGGTGGTAGCGGTGGTTCAGGTG
GTAGTGGCGGTAGTGGTGGCTCAGGGGGTTCTGGTGGCTCTGGTGGTAGCCTCGAGCACCACCACCACCACC
ACTGA
SEQ ID NO.: 15
ATGACCCAGTTTGAAGGTTTCACCAATCTGTATCAGGTTAGCAAAACCCTGCGTTTTGAACT
GATTCCGCAGGGTAAAACCCTGAAACATATTCAAGAACAGGGCTTCATCGAAGAGGATAAAGCACGTAACGA
TCACTACAAAGAACTGAAACCGATTATCGACCGCATCTATAAAACCTATGCAGATCAGTGTCTGCAGCTGGTT
CAGCTGGATTGGGAAAATCTGAGCGCAGCAATTGATAGTTATCGCAAAGAAAAAACCGAAGAAACCCGTAAT
GCACTGATTGAAGAACAGGCAACCTATCGTAATGCCATCCATGATTATTTCATTGGTCGTACCGATAATCTGAC
CGATGCAATTAACAAACGTCACGCCGAAATCTATAAAGGCCTGTTTAAAGCCGAACTGTTTAATGGCAAAGTT
CTGAAACAGCTGGGCACCGTTACCACCACCGAACATGAAAATGCACTGCTGCGTAGCTTTGATAAATTCACCA
CCTATTTCAGCGGCTTTTATGAGAATCGCAAAAACGTGTTTAGCGCAGAAGATATTAGCACCGCAATTCCGCA
TCGTATTGTGCAGGATAATTTCCCGAAATTCAAAGAGAACTGCCACATTTTTACCCGTCTGATTACCGCAGTTC
CGAGCCTGCGTGAACATTTTGAAAACGTTAAAAAAGCCATCGGCATCTTTGTTAGCACCAGCATTGAAGAAGT
TTTTAGCTTCCCGTTTTACAATCAGCTGCTGACCCAGACCCAGATTGATCTGTATAACCAACTGCTGGGTGGTA
TTAGCCGTGAAGCAGGCACCGAAAAAATCAAAGGTCTGAATGAAGTGCTGAATCTGGCCATTCAGAAAAATG
ATGAAACCGCACATATTATTGCAAGCCTGCCGCATCGTTTTATTCCGCTGTTCAAACAAATTCTGAGCGATCGT
AATACCCTGAGCTTTATTCTGGAAGAATTCAAATCCGATGAAGAGGTGATTCAGAGCTTTTGCAAATACAAAA
CGCTGCTGCGCAATGAAAATGTTCTGGAAACTGCCGAAGCACTGTTTAACGAACTGAATAGCATTGATCTGAC
CCACATCTTTATCAGCCACAAAAAACTGGAAACCATTTCAAGCGCACTGTGTGATCATTGGGATACCCTGCGTA
ATGCCCTGTATGAACGTCGTATTAGCGAACTGACCGGTAAAATTACCAAAAGCGCGAAAGAAAAAGTTCAGC
GCAGTCTGAAACATGAGGATATTAATCTGCAAGAGATTATTAGCGCAGCCGGTAAAGAACTGTCAGAAGCAT
TTAAACAGAAAACCAGCGAAATTCTGTCACATGCACATGCAGCACTGGATCAGCCGCTGCCGACCACCCTGAA
AAAACAAGAAGAAAAAGAAATCCTGAAAAGCCAGCTGGATAGCCTGCTGGGTCTGTATCATCTGCTGGACTG
GTTTGCAGTTGATGAAAGCAATGAAGTTGATCCGGAATTTAGCGCACGTCTGACCGGCATTAAACTGGAAAT
GGAACCGAGCCTGAGCTTTTATAACAAAGCCCGTAATTATGCCACCAAAAAACCGTATAGCGTCGAAAAATTC
AAACTGAACTTTCAGATGCCGACCCTGGCAAGCGGTTGGGATGTTAATAAAGAAAAAAACAACGGTGCCATC
CTGTTCGTGAAAAATGGCCTGTATTATCTGGGTATTATGCCGAAACAGAAAGGTCGTTATAAAGCGCTGAGCT
TTGAACCGACGGAAAAAACCAGTGAAGGTTTTGATAAAATGTACTACGACTATTTTCCGGATGCAGCCAAAAT
GATTCCGAAATGTAGCACCCAGCTGAAAGCAGTTACCGCACATTTTCAGACCCATACCACCCCGATTCTGCTGA
GCAATAACTTTATTGAACCGCTGGAAATCACCAAAGAGATCTACGATCTGAATAACCCGGAAAAAGAGCCGA
AAAAATTCCAGACCGCATATGCAAAAAAAACCGGTGATCAGAAAGGTTATCGTGAAGCGCTGTGTAAATGGA
TTGATTTCACCCGTGATTTTCTGAGCAAATACACCAAAACCACCAGTATCGATCTGAGCAGCCTGCGTCCGAGC
AGCCAGTATAAAGATCTGGGCGAATATTATGCAGAACTGAATCCGCTGCTGTATCATATTAGCTTTCAGCGTA
TTGCCGAGAAAGAAATCATGGACGCAGTTGAAACCGGTAAACTGTACCTGTTCCAGATCTACAATAAAGATTT
TGCCAAAGGCCATCATGGCAAACCGAATCTGCATACCCTGTATTGGACCGGTCTGTTTAGCCCTGAAAATCTG
GCAAAAACCTCGATTAAACTGAATGGTCAGGCGGAACTGTTTTATCGTCCGAAAAGCCGTATGAAACGTATG
GCACATCGTCTGGGTGAAAAAATGCTGAACAAAAAACTGAAAGACCAGAAAACCCCGATCCCGGATACACTG
TATCAAGAACTGTATGATTATGTGAACCATCGTCTGAGCCATGATCTGAGTGATGAAGCACGTGCCCTGCTGC
CGAATGTTATTACCAAAGAAGTTAGCCACGAGATCATTAAAGATCGTCGTTTTACCAGCGACAAATTCTTTTTT
CATGTGCCGATTACCCTGAATTATCAGGCAGCAAATAGCCCGAGCAAATTTAACCAGCGTGTTAATGCATATC
TGAAAGAACATCCAGAAACGCCGATTATTGGTATTGATCGTGGTGAACGTAACCTGATTTATATCACCGTTATT
GATAGCACCGGCAAAATCCTGGAACAGCGTAGCCTGAATACCATTCAGCAGTTTGATTACCAGAAAAAACTG
GATAATCGCGAGAAAGAACGTGTTGCAGCACGTCAGGCATGGTCAGTTGTTGGTACAATTAAAGACCTGAAA
CAGGGTTATCTGAGCCAGGTTATTCATGAAATTGTGGATCTGATGATTCACTATCAGGCCGTTGTTGTGCTGG
AAAACCTGAATTTTGGCTTTAAAAGCAAACGTACCGGCATTGCAGAAAAAGCAGTTTATCAGCAGTTCGAGAA
AATGCTGATTGACAAACTGAATTGCCTGGTGCTGAAAGATTATCCGGCTGAAAAAGTTGGTGGTGTTCTGAAT
CCGTATCAGCTGACCGATCAGTTTACCAGCTTTGCAAAAATGGGCACCCAGAGCGGATTTCTGTTTTATGTTCC
GGCACCGTATACGAGCAAAATTGATCCGCTGACCGGTTTTGTTGATCCGTTTGTTTGGAAAACCATCAAAAAC
CATGAAAGCCGCAAACATTTTCTGGAAGGTTTCGATTTTCTGCATTACGACGTTAAAACGGGTGATTTCATCCT
GCACTTTAAAATGAATCGCAATCTGAGTTTTCAGCGTGGCCTGCCTGGTTTTATGCCTGCATGGGATATTGTGT
TTGAGAAAAACGAAACACAGTTCGATGCAAAAGGCACCCCGTTTATTGCAGGTAAACGTATTGTTCCGGTGAT
TGAAAATCATCGTTTCACCGGTCGTTATCGCGATCTGTATCCGGCAAATGAACTGATCGCACTGCTGGAAGAG
AAAGGTATTGTTTTTCGTGATGGCTCAAACATTCTGCCGAAACTGCTGGAAAATGATGATAGCCATGCAATTG
ATACCATGGTTGCACTGATTCGTAGCGTTCTGCAGATGCGTAATAGCAATGCAGCAACCGGTGAAGATTACAT
TAATAGTCCGGTTCGTGATCTGAATGGTGTTTGTTTTGATAGCCGTTTTCAGAATCCGGAATGGCCGATGGAT
GCAGATGCAAATGGTGCATATCATATTGCACTGAAAGGACAGCTGCTGCTGAACCACCTGAAAGAAAGCAAA
GATCTGAAACTGCAAAACGGCATTAGCAATCAGGATTGGCTGGCATATATCCAAGAACTGCGTAACGGTCGT
AAACGTACCGCAGATGGTAGCGAATTTGAAAGCCCGAAAAAAAAGCGTAAGGTGGAAGGTGGTAGCGGTGG
TTCAGGTGGTAGTGGCGGTAGTGGTGGCTCAGGGGGTTCTGGTGGCTCTGGTGGTAGCCTCGAGCACCACCA
CCACCACCACTGA
SEQ ID NO.: 16
ATGACCCAGTTTGAAGGTTTCACCAATCTGTATCAGGTTAGCAAAACCCTGCGTTTTGAACT
GATTCCGCAGGGTAAAACCCTGAAACATATTCAAGAACAGGGCTTCATCGAAGAGGATAAAGCACGTAACGA
TCACTACAAAGAACTGAAACCGATTATCGACCGCATCTATAAAACCTATGCAGATCAGTGTCTGCAGCTGGTT
CAGCTGGATTGGGAAAATCTGAGCGCAGCAATTGATAGTTATCGCAAAGAAAAAACCGAAGAAACCCGTAAT
GCACTGATTGAAGAACAGGCAACCTATCGTAATGCCATCCATGATTATTTCATTGGTCGTACCGATAATCTGAC
CGATGCAATTAACAAACGTCACGCCGAAATCTATAAAGGCCTGTTTAAAGCCGAACTGTTTAATGGCAAAGTT
CTGAAACAGCTGGGCACCGTTACCACCACCGAACATGAAAATGCACTGCTGCGTAGCTTTGATAAATTCACCA
CCTATTTCAGCGGCTTTTATGAGAATCGCAAAAACGTGTTTAGCGCAGAAGATATTAGCACCGCAATTCCGCA
TCGTATTGTGCAGGATAATTTCCCGAAATTCAAAGAGAACTGCCACATTTTTACCCGTCTGATTACCGCAGTTC
CGAGCCTGCGTGAACATTTTGAAAACGTTAAAAAAGCCATCGGCATCTTTGTTAGCACCAGCATTGAAGAAGT
TTTTAGCTTCCCGTTTTACAATCAGCTGCTGACCCAGACCCAGATTGATCTGTATAACCAACTGCTGGGTGGTA
TTAGCCGTGAAGCAGGCACCGAAAAAATCAAAGGTCTGAATGAAGTGCTGAATCTGGCCATTCAGAAAAATG
ATGAAACCGCACATATTATTGCAAGCCTGCCGCATCGTTTTATTCCGCTGTTCAAACAAATTCTGAGCGATCGT
AATACCCTGAGCTTTATTCTGGAAGAATTCAAATCCGATGAAGAGGTGATTCAGAGCTTTTGCAAATACAAAA
CGCTGCTGCGCAATGAAAATGTTCTGGAAACTGCCGAAGCACTGTTTAACGAACTGAATAGCATTGATCTGAC
CCACATCTTTATCAGCCACAAAAAACTGGAAACCATTTCAAGCGCACTGTGTGATCATTGGGATACCCTGCGTA
ATGCCCTGTATGAACGTCGTATTAGCGAACTGACCGGTAAAATTACCAAAAGCGCGAAAGAAAAAGTTCAGC
GCAGTCTGAAACATGAGGATATTAATCTGCAAGAGATTATTAGCGCAGCCGGTAAAGAACTGTCAGAAGCAT
TTAAACAGAAAACCAGCGAAATTCTGTCACATGCACATGCAGCACTGGATCAGCCGCTGCCGACCACCCTGAA
AAAACAAGAAGAAAAAGAAATCCTGAAAAGCCAGCTGGATAGCCTGCTGGGTCTGTATCATCTGCTGGACTG
GTTTGCAGTTGATGAAAGCAATGAAGTTGATCCGGAATTTAGCGCACGTCTGACCGGCATTAAACTGGAAAT
GGAACCGAGCCTGAGCTTTTATAACAAAGCCCGTAATTATGCCACCAAAAAACCGTATAGCGTCGAAAAATTC
AAACTGAACTTTCAGATGCCGACCCTGGCAAGCGGTTGGGATGTTAATAAAGAAAAAAACAACGGTGCCATC
CTGTTCGTGAAAAATGGCCTGTATTATCTGGGTATTATGCCGAAACAGAAAGGTCGTTATAAAGCGCTGAGCT
TTGAACCGACGGAAAAAACCAGTGAAGGTTTTGATAAAATGTACTACGACTATTTTCCGGATGCAGCCAAAAT
GATTCCGAAATGTAGCACCCAGCTGAAAGCAGTTACCGCACATTTTCAGACCCATACCACCCCGATTCTGCTGA
GCAATAACTTTATTGAACCGCTGGAAATCACCAAAGAGATCTACGATCTGAATAACCCGGAAAAAGAGCCGA
AAAAATTCCAGACCGCATATGCAAAAAAAACCGGTGATCAGAAAGGTTATCGTGAAGCGCTGTGTAAATGGA
TTGATTTCACCCGTGATTTTCTGAGCAAATACACCAAAACCACCAGTATCGATCTGAGCAGCCTGCGTCCGAGC
AGCCAGTATAAAGATCTGGGCGAATATTATGCAGAACTGAATCCGCTGCTGTATCATATTAGCTTTCAGCGTA
TTGCCGAGAAAGAAATCATGGACGCAGTTGAAACCGGTAAACTGTACCTGTTCCAGATCTACAATAAAGATTT
TGCCAAAGGCCATCATGGCAAACCGAATCTGCATACCCTGTATTGGACCGGTCTGTTTAGCCCTGAAAATCTG
GCAAAAACCTCGATTAAACTGAATGGTCAGGCGGAACTGTTTTATCGTCCGAAAAGCCGTATGAAACGTATG
GCACATCGTCTGGGTGAAAAAATGCTGAACAAAAAACTGAAAGACCAGAAAACCCCGATCCCGGATACACTG
TATCAAGAACTGTATGATTATGTGAACCATCGTCTGAGCCATGATCTGAGTGATGAAGCACGTGCCCTGCTGC
CGAATGTTATTACCAAAGAAGTTAGCCACGAGATCATTAAAGATCGTCGTTTTACCAGCGACAAATTCTTTTTT
CATGTGCCGATTACCCTGAATTATCAGGCAGCAAATAGCCCGAGCAAATTTAACCAGCGTGTTAATGCATATC
TGAAAGAACATCCAGAAACGCCGATTATTGGTATTGATCGTGGTGAACGTAACCTGATTTATATCACCGTTATT
GATAGCACCGGCAAAATCCTGGAACAGCGTAGCCTGAATACCATTCAGCAGTTTGATTACCAGAAAAAACTG
GATAATCGCGAGAAAGAACGTGTTGCAGCACGTCAGGCATGGTCAGTTGTTGGTACAATTAAAGACCTGAAA
CAGGGTTATCTGAGCCAGGTTATTCATGAAATTGTGGATCTGATGATTCACTATCAGGCCGTTGTTGTGCTGG
AAAACCTGAATTTTGGCTTTAAAAGCAAACGTACCGGCATTGCAGAAAAAGCAGTTTATCAGCAGTTCGAGAA
AATGCTGATTGACAAACTGAATTGCCTGGTGCTGAAAGATTATCCGGCTGAAAAAGTTGGTGGTGTTCTGAAT
CCGTATCAGCTGACCGATCAGTTTACCAGCTTTGCAAAAATGGGCACCCAGAGCGGATTTCTGTTTTATGTTCC
GGCACCGTATACGAGCAAAATTGATCCGCTGACCGGTTTTGTTGATCCGTTTGTTTGGAAAACCATCAAAAAC
CATGAAAGCCGCAAACATTTTCTGGAAGGTTTCGATTTTCTGCATTACGACGTTAAAACGGGTGATTTCATCCT
GCACTTTAAAATGAATCGCAATCTGAGTTTTCAGCGTGGCCTGCCTGGTTTTATGCCTGCATGGGATATTGTGT
TTGAGAAAAACGAAACACAGTTCGATGCAAAAGGCACCCCGTTTATTGCAGGTAAACGTATTGTTCCGGTGAT
TGAAAATCATCGTTTCACCGGTCGTTATCGCGATCTGTATCCGGCAAATGAACTGATCGCACTGCTGGAAGAG
AAAGGTATTGTTTTTCGTGATGGCTCAAACATTCTGCCGAAACTGCTGGAAAATGATGATAGCCATGCAATTG
ATACCATGGTTGCACTGATTCGTAGCGTTCTGCAGATGCGTAATAGCAATGCAGCAACCGGTGAAGATTACAT
TAATAGTCCGGTTCGTGATCTGAATGGTGTTTGTTTTGATAGCCGTTTTCAGAATCCGGAATGGCCGATGGAT
GCAGATGCAAATGGTGCATATCATATTGCACTGAAAGGACAGCTGCTGCTGAACCACCTGAAAGAAAGCAAA
GATCTGAAACTGCAAAACGGCATTAGCAATCAGGATTGGCTGGCATATATCCAAGAACTGCGTAACGGTCGT
AGCAGTGATGATGAAGCAACCGCAGATAGCCAGCATGCAGCACCGCCTAAAAAGAAACGTAAAGTTGGTGG
TAGCGGCGGTAGTAAACGTACCGCAGATGGTAGCGAATTTGAAAGCCCGAAAAAAAAGCGTAAGGTGGAAG
GTGGTAGCGGTGGTTCAGGTGGTAGTGGCGGTAGTGGTGGCTCAGGGGGTTCTGGTGGCTCTGGTGGTAGC
CTCGAGCACCACCACCACCACCACTGA
SEQ ID NO.: 17
ATGACCCAGTTTGAAGGTTTCACCAATCTGTATCAGGTTAGCAAAACCCTGCGTTTTGAACT
GATTCCGCAGGGTAAAACCCTGAAACATATTCAAGAACAGGGCTTCATCGAAGAGGATAAAGCACGTAACGA
TCACTACAAAGAACTGAAACCGATTATCGACCGCATCTATAAAACCTATGCAGATCAGTGTCTGCAGCTGGTT
CAGCTGGATTGGGAAAATCTGAGCGCAGCAATTGATAGTTATCGCAAAGAAAAAACCGAAGAAACCCGTAAT
GCACTGATTGAAGAACAGGCAACCTATCGTAATGCCATCCATGATTATTTCATTGGTCGTACCGATAATCTGAC
CGATGCAATTAACAAACGTCACGCCGAAATCTATAAAGGCCTGTTTAAAGCCGAACTGTTTAATGGCAAAGTT
CTGAAACAGCTGGGCACCGTTACCACCACCGAACATGAAAATGCACTGCTGCGTAGCTTTGATAAATTCACCA
CCTATTTCAGCGGCTTTTATGAGAATCGCAAAAACGTGTTTAGCGCAGAAGATATTAGCACCGCAATTCCGCA
TCGTATTGTGCAGGATAATTTCCCGAAATTCAAAGAGAACTGCCACATTTTTACCCGTCTGATTACCGCAGTTC
CGAGCCTGCGTGAACATTTTGAAAACGTTAAAAAAGCCATCGGCATCTTTGTTAGCACCAGCATTGAAGAAGT
TTTTAGCTTCCCGTTTTACAATCAGCTGCTGACCCAGACCCAGATTGATCTGTATAACCAACTGCTGGGTGGTA
TTAGCCGTGAAGCAGGCACCGAAAAAATCAAAGGTCTGAATGAAGTGCTGAATCTGGCCATTCAGAAAAATG
ATGAAACCGCACATATTATTGCAAGCCTGCCGCATCGTTTTATTCCGCTGTTCAAACAAATTCTGAGCGATCGT
AATACCCTGAGCTTTATTCTGGAAGAATTCAAATCCGATGAAGAGGTGATTCAGAGCTTTTGCAAATACAAAA
CGCTGCTGCGCAATGAAAATGTTCTGGAAACTGCCGAAGCACTGTTTAACGAACTGAATAGCATTGATCTGAC
CCACATCTTTATCAGCCACAAAAAACTGGAAACCATTTCAAGCGCACTGTGTGATCATTGGGATACCCTGCGTA
ATGCCCTGTATGAACGTCGTATTAGCGAACTGACCGGTAAAATTACCAAAAGCGCGAAAGAAAAAGTTCAGC
GCAGTCTGAAACATGAGGATATTAATCTGCAAGAGATTATTAGCGCAGCCGGTAAAGAACTGTCAGAAGCAT
TTAAACAGAAAACCAGCGAAATTCTGTCACATGCACATGCAGCACTGGATCAGCCGCTGCCGACCACCCTGAA
AAAACAAGAAGAAAAAGAAATCCTGAAAAGCCAGCTGGATAGCCTGCTGGGTCTGTATCATCTGCTGGACTG
GTTTGCAGTTGATGAAAGCAATGAAGTTGATCCGGAATTTAGCGCACGTCTGACCGGCATTAAACTGGAAAT
GGAACCGAGCCTGAGCTTTTATAACAAAGCCCGTAATTATGCCACCAAAAAACCGTATAGCGTCGAAAAATTC
AAACTGAACTTTCAGATGCCGACCCTGGCAAGCGGTTGGGATGTTAATAAAGAAAAAAACAACGGTGCCATC
CTGTTCGTGAAAAATGGCCTGTATTATCTGGGTATTATGCCGAAACAGAAAGGTCGTTATAAAGCGCTGAGCT
TTGAACCGACGGAAAAAACCAGTGAAGGTTTTGATAAAATGTACTACGACTATTTTCCGGATGCAGCCAAAAT
GATTCCGAAATGTAGCACCCAGCTGAAAGCAGTTACCGCACATTTTCAGACCCATACCACCCCGATTCTGCTGA
GCAATAACTTTATTGAACCGCTGGAAATCACCAAAGAGATCTACGATCTGAATAACCCGGAAAAAGAGCCGA
AAAAATTCCAGACCGCATATGCAAAAAAAACCGGTGATCAGAAAGGTTATCGTGAAGCGCTGTGTAAATGGA
TTGATTTCACCCGTGATTTTCTGAGCAAATACACCAAAACCACCAGTATCGATCTGAGCAGCCTGCGTCCGAGC
AGCCAGTATAAAGATCTGGGCGAATATTATGCAGAACTGAATCCGCTGCTGTATCATATTAGCTTTCAGCGTA
TTGCCGAGAAAGAAATCATGGACGCAGTTGAAACCGGTAAACTGTACCTGTTCCAGATCTACAATAAAGATTT
TGCCAAAGGCCATCATGGCAAACCGAATCTGCATACCCTGTATTGGACCGGTCTGTTTAGCCCTGAAAATCTG
GCAAAAACCTCGATTAAACTGAATGGTCAGGCGGAACTGTTTTATCGTCCGAAAAGCCGTATGAAACGTATG
GCACATCGTCTGGGTGAAAAAATGCTGAACAAAAAACTGAAAGACCAGAAAACCCCGATCCCGGATACACTG
TATCAAGAACTGTATGATTATGTGAACCATCGTCTGAGCCATGATCTGAGTGATGAAGCACGTGCCCTGCTGC
CGAATGTTATTACCAAAGAAGTTAGCCACGAGATCATTAAAGATCGTCGTTTTACCAGCGACAAATTCTTTTTT
CATGTGCCGATTACCCTGAATTATCAGGCAGCAAATAGCCCGAGCAAATTTAACCAGCGTGTTAATGCATATC
TGAAAGAACATCCAGAAACGCCGATTATTGGTATTGATCGTGGTGAACGTAACCTGATTTATATCACCGTTATT
GATAGCACCGGCAAAATCCTGGAACAGCGTAGCCTGAATACCATTCAGCAGTTTGATTACCAGAAAAAACTG
GATAATCGCGAGAAAGAACGTGTTGCAGCACGTCAGGCATGGTCAGTTGTTGGTACAATTAAAGACCTGAAA
CAGGGTTATCTGAGCCAGGTTATTCATGAAATTGTGGATCTGATGATTCACTATCAGGCCGTTGTTGTGCTGG
AAAACCTGAATTTTGGCTTTAAAAGCAAACGTACCGGCATTGCAGAAAAAGCAGTTTATCAGCAGTTCGAGAA
AATGCTGATTGACAAACTGAATTGCCTGGTGCTGAAAGATTATCCGGCTGAAAAAGTTGGTGGTGTTCTGAAT
CCGTATCAGCTGACCGATCAGTTTACCAGCTTTGCAAAAATGGGCACCCAGAGCGGATTTCTGTTTTATGTTCC
GGCACCGTATACGAGCAAAATTGATCCGCTGACCGGTTTTGTTGATCCGTTTGTTTGGAAAACCATCAAAAAC
CATGAAAGCCGCAAACATTTTCTGGAAGGTTTCGATTTTCTGCATTACGACGTTAAAACGGGTGATTTCATCCT
GCACTTTAAAATGAATCGCAATCTGAGTTTTCAGCGTGGCCTGCCTGGTTTTATGCCTGCATGGGATATTGTGT
TTGAGAAAAACGAAACACAGTTCGATGCAAAAGGCACCCCGTTTATTGCAGGTAAACGTATTGTTCCGGTGAT
TGAAAATCATCGTTTCACCGGTCGTTATCGCGATCTGTATCCGGCAAATGAACTGATCGCACTGCTGGAAGAG
AAAGGTATTGTTTTTCGTGATGGCTCAAACATTCTGCCGAAACTGCTGGAAAATGATGATAGCCATGCAATTG
ATACCATGGTTGCACTGATTCGTAGCGTTCTGCAGATGCGTAATAGCAATGCAGCAACCGGTGAAGATTACAT
TAATAGTCCGGTTCGTGATCTGAATGGTGTTTGTTTTGATAGCCGTTTTCAGAATCCGGAATGGCCGATGGAT
GCAGATGCAAATGGTGCATATCATATTGCACTGAAAGGACAGCTGCTGCTGAACCACCTGAAAGAAAGCAAA
GATCTGAAACTGCAAAACGGCATTAGCAATCAGGATTGGCTGGCATATATCCAAGAACTGCGTAACGGTCGT
AAACGTCCGGCAGCAACCAAAAAAGCAGGTCAGGCAAAAAAGAAAAAAGGTGGTAGCGGCGGTAGTAAAC
GTACCGCAGATGGTAGCGAATTTGAAAGCCCGAAAAAAAAGCGTAAGGTGGAAGGTGGTAGCGGTGGTTCA
GGTGGTAGTGGCGGTAGTGGTGGCTCAGGGGGTTCTGGTGGCTCTGGTGGTAGCCTCGAGCACCACCACCA
CCACCACTGA

[0094] The following amino acid sequences of preferred Cas12a polypeptides are depicted below.

SEQ ID NO.: 18

MGSSSSGLVPRGSHMASMTGGQQMGRDPGKPIPNPLLGLDSTAPKKKRKV
GIHGVPAATQFEGFTNLYQVSKTLRFELIPQGKTLKHIQEQGFIEEDKAR
NDHYKELKPIIDRIYKTYADQCLQLVQLDWENLSAAIDSYRKEKTEETRN
ALIEEQATYRNAIHDYFIGRTDNLTDAINKRHAEIYKGLFKAELFNGKVL
KQLGTVTTTEHENALLRSFDKFTTYFSGFYENRKNVFSAEDISTAIPHRI
VQDNFPKFKENCHIFTRLITAVPSLREHFENVKKAIGIFVSTSIEEVFSF
PFYNQLLTQTQIDLYNQLLGGISREAGTEKIKGLNEVLNLAIQKNDETAH
IIASLPHRFIPLFKQILSDRNTLSFILEEFKSDEEVIQSFCKYKTLLRNE
NVLETAEALFNELNSIDLTHIFISHKKLETISSALCDHWDTLRNALYERR
ISELTGKITKSAKEKVQRSLKHEDINLQEIISAAGKELSEAFKQKTSEIL
SHAHAALDQPLPTTLKKQEEKEILKSQLDSLLGLYHLLDWFAVDESNEVD
PEFSARLTGIKLEMEPSLSFYNKARNYATKKPYSVEKFKLNFQMPTLASG
WDVNKEKNNGAILFVKNGLYYLGIMPKQKGRYKALSFEPTEKTSEGFDKM
YYDYFPDAAKMIPKCSTQLKAVTAHFQTHTTPILLSNNFIEPLEITKEIY
DLNNPEKEPKKFQTAYAKKTGDQKGYREALCKWIDFTRDFLSKYTKTTSI
DLSSLRPSSQYKDLGEYYAELNPLLYHISFQRIAEKEIMDAVETGKLYLF
QIYNKDFAKGHHGKPNLHTLYWTGLFSPENLAKTSIKLNGQAELFYRPKS
RMKRMAHRLGEKMLNKKLKDQKTPIPDTLYQELYDYVNHRLSHDLSDEAR
ALLPNVITKEVSHEIIKDRRFTSDKFFFHVPITLNYQAANSPSKFNQRVN
AYLKEHPETPIIGIDRGERNLIYITVIDSTGKILEQRSLNTIQQFDYQKK
LDNREKERVAARQAWSVVGTIKDLKQGYLSQVIHEIVDLMIHYQAVVVLE
NLNFGFKSKRTGIAEKAVYQQFEKMLIDKLNCLVLKDYPAEKVGGVLNPY
QLTDQFTSFAKMGTQSGFLFYVPAPYTSKIDPLTGFVDPFVWKTIKNHES
RKHFLEGFDFLHYDVKTGDFILHFKMNRNLSFQRGLPGFMPAWDIVFEKN
ETQFDAKGTPFIAGKRIVPVIENHRFTGRYRDLYPANELIALLEEKGIVF
RDGSNILPKLLENDDSHAIDTMVALIRSVLQMRNSNAATGEDYINSPVRD
LNGVCFDSRFQNPEWPMDADANGAYHIALKGQLLLNHLKESKDLKLQNGI
SNQDWLAYIQELRNPKKKRKVKLAAALEHHHHHH

SEQ ID NO.: 19

MGSSSSGLVPRGSHMASMTGGQQMGRDPAPKKKRKVGIHGVPAATQFEGF
TNLYQVSKTLRFELIPQGKTLKHIQEQGFIEEDKARNDHYKELKPIIDRI
YKTYADQCLQLVQLDWENLSAAIDSYRKEKTEETRNALIEEQATYRNAIH
DYFIGRTDNLTDAINKRHAEIYKGLFKAELFNGKVLKQLGTVTTTEHENA
LLRSFDKFTTYFSGFYENRKNVFSAEDISTAIPHRIVQDNFPKFKENCHI
FTRLITAVPSLREHFENVKKAIGIFVSTSIEEVFSFPFYNQLLTQTQIDL
YNQLLGGISREAGTEKIKGLNEVLNLAIQKNDETAHIIASLPHRFIPLFK
QILSDRNTLSFILEEFKSDEEVIQSFCKYKTLLRNENVLETAEALFNELN
SIDLTHIFISHKKLETISSALCDHWDTLRNALYERRISELTGKITKSAKE
KVQRSLKHEDINLQEIISAAGKELSEAFKQKTSEILSHAHAALDQPLPTT
LKKQEEKEILKSQLDSLLGLYHLLDWFAVDESNEVDPEFSARLTGIKLEM
EPSLSFYNKARNYATKKPYSVEKFKLNFQMPTLASGWDVNKEKNNGAILF
VKNGLYYLGIMPKQKGRYKALSFEPTEKTSEGFDKMYYDYFPDAAKMIPK
CSTQLKAVTAHFQTHTTPILLSNNFIEPLEITKEIYDLNNPEKEPKKFQT
AYAKKTGDQKGYREALCKWIDFTRDFLSKYTKTTSIDLSSLRPSSQYKDL
GEYYAELNPLLYHISFQRIAEKEIMDAVETGKLYLFQIYNKDFAKGHHGK
PNLHTLYWTGLFSPENLAKTSIKLNGQAELFYRPKSRMKRMAHRLGEKML
NKKLKDQKTPIPDTLYQELYDYVNHRLSHDLSDEARALLPNVITKEVSHE
IIKDRRFTSDKFFFHVPITLNYQAANSPSKFNQRVNAYLKEHPETPIIGI
DRGERNLIYITVIDSTGKILEQRSLNTIQQFDYQKKLDNREKERVAARQA
WSVVGTIKDLKQGYLSQVIHEIVDLMIHYQAVVVLENLNFGFKSKRTGIA
EKAVYQQFEKMLIDKLNCLVLKDYPAEKVGGVLNPYQLTDQFTSFAKMGT
QSGFLFYVPAPYTSKIDPLTGFVDPFVWKTIKNHESRKHFLEGFDFLHYD
VKTGDFILHFKMNRNLSFQRGLPGFMPAWDIVFEKNETQFDAKGTPFIAG
KRIVPVIENHRFTGRYRDLYPANELIALLEEKGIVFRDGSNILPKLLEND
DSHAIDTMVALIRSVLQMRNSNAATGEDYINSPVRDLNGVCFDSRFQNPE
WPMDADANGAYHIALKGQLLLNHLKESKDLKLQNGISNQDWLAYIQELRN
PKKKRKVKLAAALEHHHHHH

SEQ ID NO.: 20

MPKKKRKVGIHGVPAATQFEGFTNLYQVSKTLRFELIPQGKTLKHIQEQG
FIEEDKARNDHYKELKPIIDRIYKTYADQCLQLVQLDWENLSAAIDSYRK
EKTEETRNALIEEQATYRNAIHDYFIGRTDNLTDAINKRHAEIYKGLFKA
ELFNGKVLKQLGTVTTTEHENALLRSFDKFTTYFSGFYENRKNVFSAEDI
STAIPHRIVQDNFPKFKENCHIFTRLITAVPSLREHFENVKKAIGIFVST
SIEEVFSFPFYNQLLTQTQIDLYNQLLGGISREAGTEKIKGLNEVLNLAI
QKNDETAHIIASLPHRFIPLFKQILSDRNTLSFILEEFKSDEEVIQSFCK
YKTLLRNENVLETAEALFNELNSIDLTHIFISHKKLETISSALCDHWDTL
RNALYERRISELTGKITKSAKEKVQRSLKHEDINLQEIISAAGKELSEAF
KQKTSEILSHAHAALDQPLPTTLKKQEEKEILKSQLDSLLGLYHLLDWFA
VDESNEVDPEFSARLTGIKLEMEPSLSFYNKARNYATKKPYSVEKFKLNF
QMPTLASGWDVNKEKNNGAILFVKNGLYYLGIMPKQKGRYKALSFEPTEK
TSEGFDKMYYDYFPDAAKMIPKCSTQLKAVTAHFQTHTTPILLSNNFIEP
LEITKEIYDLNNPEKEPKKFQTAYAKKTGDQKGYREALCKWIDFTRDFLS
KYTKTTSIDLSSLRPSSQYKDLGEYYAELNPLLYHISFQRIAEKEIMDAV
ETGKLYLFQIYNKDFAKGHHGKPNLHTLYWTGLFSPENLAKTSIKLNGQA
ELFYRPKSRMKRMAHRLGEKMLNKKLKDQKTPIPDTLYQELYDYVNHRLS
HDLSDEARALLPNVITKEVSHEIIKDRRFTSDKFFFHVPITLNYQAANSP
SKFNQRVNAYLKEHPETPIIGIDRGERNLIYITVIDSTGKILEQRSLNTI
QQFDYQKKLDNREKERVAARQAWSVVGTIKDLKQGYLSQVIHEIVDLMIH
YQAVVVLENLNFGFKSKRTGIAEKAVYQQFEKMLIDKLNCLVLKDYPAEK
VGGVLNPYQLTDQFTSFAKMGTQSGFLFYVPAPYTSKIDPLTGFVDPFVW
KTIKNHESRKHFLEGFDFLHYDVKTGDFILHFKMNRNLSFQRGLPGFMPA
WDIVFEKNETQFDAKGTPFIAGKRIVPVIENHRFTGRYRDLYPANELIAL
LEEKGIVFRDGSNILPKLLENDDSHAIDTMVALIRSVLQMRNSNAATGED
YINSPVRDLNGVCFDSRFQNPEWPMDADANGAYHIALKGQLLLNHLKESK
DLKLQNGISNQDWLAYIQELRNPKKKRKVLEHHHHHH

SEQ ID NO.: 21

MTQFEGFTNLYQVSKTLRFELIPQGKTLKHIQEQGFIEEDKARNDHYKEL
KPIIDRIYKTYADQCLQLVQLDWENLSAAIDSYRKEKTEETRNALIEEQA
TYRNAIHDYFIGRTDNLTDAINKRHAEIYKGLFKAELFNGKVLKQLGTVT
TTEHENALLRSFDKFTTYFSGFYENRKNVFSAEDISTAIPHRIVQDNFPK
FKENCHIFTRLITAVPSLREHFENVKKAIGIFVSTSIEEVFSFPFYNQLL
TQTQIDLYNQLLGGISREAGTEKIKGLNEVLNLAIQKNDETAHIIASLPH
RFIPLFKQILSDRNTLSFILEEFKSDEEVIQSFCKYKTLLRNENVLETAE
ALFNELNSIDLTHIFISHKKLETISSALCDHWDTLRNALYERRISELTGK
ITKSAKEKVQRSLKHEDINLQEIISAAGKELSEAFKQKTSEILSHAHAAL
DQPLPTTLKKQEEKEILKSQLDSLLGLYHLLDWFAVDESNEVDPEFSARL
TGIKLEMEPSLSFYNKARNYATKKPYSVEKFKLNFQMPTLASGWDVNKEK
NNGAILFVKNGLYYLGIMPKQKGRYKALSFEPTEKTSEGFDKMYYDYFPD
AAKMIPKCSTQLKAVTAHFQTHTTPILLSNNFIEPLEITKEIYDLNNPEK
EPKKFQTAYAKKTGDQKGYREALCKWIDFTRDFLSKYTKTTSIDLSSLRP
SSQYKDLGEYYAELNPLLYHISFQRIAEKEIMDAVETGKLYLFQIYNKDF
AKGHHGKPNLHTLYWTGLFSPENLAKTSIKLNGQAELFYRPKSRMKRMAH
RLGEKMLNKKLKDQKTPIPDTLYQELYDYVNHRLSHDLSDEARALLPNVI
TKEVSHEIIKDRRFTSDKFFFHVPITLNYQAANSPSKFNQRVNAYLKEHP
ETPIIGIDRGERNLIYITVIDSTGKILEQRSLNTIQQFDYQKKLDNREKE
RVAARQAWSVVGTIKDLKQGYLSQVIHEIVDLMIHYQAVVVLENLNFGFK
SKRTGIAEKAVYQQFEKMLIDKLNCLVLKDYPAEKVGGVLNPYQLTDQFT
SFAKMGTQSGFLFYVPAPYTSKIDPLTGFVDPFVWKTIKNHESRKHFLEG
FDFLHYDVKTGDFILHFKMNRNLSFQRGLPGFMPAWDIVFEKNETQFDAK
GTPFIAGKRIVPVIENHRFTGRYRDLYPANELIALLEEKGIVFRDGSNIL
PKLLENDDSHAIDTMVALIRSVLQMRNSNAATGEDYINSPVRDLNGVCFD
SRFQNPEWPMDADANGAYHIALKGQLLLNHLKESKDLKLQNGISNQDWLA
YIQELRNPKKKRKVLEHHHHHH

SEQ ID NO.: 22

MGSSHHHHHHSSGLVPRGSHMASMTGGQQMGRDPTQFEGFTNLYQVSKTL
RFELIPQGKTLKHIQEQGFIEEDKARNDHYKELKPIIDRIYKTYADQCLQ
LVQLDWENLSAAIDSYRKEKTEETRNALIEEQATYRNAIHDYFIGRTDNL
TDAINKRHAEIYKGLFKAELFNGKVLKQLGTVTTTEHENALLRSFDKFTT
YFSGFYENRKNVFSAEDISTAIPHRIVQDNFPKFKENCHIFTRLITAVPS
LREHFENVKKAIGIFVSTSIEEVFSFPFYNQLLTQTQIDLYNQLLGGISR
EAGTEKIKGLNEVLNLAIQKNDETAHIIASLPHRFIPLFKQILSDRNTLS
FILEEFKSDEEVIQSFCKYKTLLRNENVLETAEALFNELNSIDLTHIFIS
HKKLETISSALCDHWDTLRNALYERRISELTGKITKSAKEKVQRSLKHED
INLQEIISAAGKELSEAFKQKTSEILSHAHAALDQPLPTTLKKQEEKEIL
KSQLDSLLGLYHLLDWFAVDESNEVDPEFSARLTGIKLEMEPSLSFYNKA
RNYATKKPYSVEKFKLNFQMPTLASGWDVNKEKNNGAILFVKNGLYYLGI
MPKQKGRYKALSFEPTEKTSEGFDKMYYDYFPDAAKMIPKCSTQLKAVTA
HFQTHTTPILLSNNFIEPLEITKEIYDLNNPEKEPKKFQTAYAKKTGDQK
GYREALCKWIDFTRDFLSKYTKTTSIDLSSLRPSSQYKDLGEYYAELNPL
LYHISFQRIAEKEIMDAVETGKLYLFQIYNKDFAKGHHGKPNLHTLYWTG
LFSPENLAKTSIKLNGQAELFYRPKSRMKRMAHRLGEKMLNKKLKDQKTP
IPDTLYQELYDYVNHRLSHDLSDEARALLPNVITKEVSHEIIKDRRFTSD
KFFFHVPITLNYQAANSPSKFNQRVNAYLKEHPETPIIGIDRGERNLIYI
TVIDSTGKILEQRSLNTIQQFDYQKKLDNREKERVAARQAWSVVGTIKDL
KQGYLSQVIHEIVDLMIHYQAVVVLENLNFGFKSKRTGIAEKAVYQQFEK
MLIDKLNCLVLKDYPAEKVGGVLNPYQLTDQFTSFAKMGTQSGFLFYVPA
PYTSKIDPLTGFVDPFVWKTIKNHESRKHFLEGFDFLHYDVKTGDFILHF
KMNRNLSFQRGLPGFMPAWDIVFEKNETQFDAKGTPFIAGKRIVPVIENH
RFTGRYRDLYPANELIALLEEKGIVFRDGSNILPKLLENDDSHAIDTMVA
LIRSVLQMRNSNAATGEDYINSPVRDLNGVCFDSRFQNPEWPMDADANGA
YHIALKGQLLLNHLKESKDLKLQNGISNQDWLAYIQELRNGRSSDDEATA
DSQHAAPPKKKRKVGGSGGSGGSGGSGGSGGSGGSGGSLEHHHHHH

SEQ ID NO.: 23

MTQFEGFTNLYQVSKTLRFELIPQGKTLKHIQEQGFIEEDKARNDHYKEL
KPIIDRIYKTYADQCLQLVQLDWENLSAAIDSYRKEKTEETRNALIEEQA
TYRNAIHDYFIGRTDNLTDAINKRHAEIYKGLFKAELFNGKVLKQLGTVT
TTEHENALLRSFDKFTTYFSGFYENRKNVFSAEDISTAIPHRIVQDNFPK
FKENCHIFTRLITAVPSLREHFENVKKAIGIFVSTSIEEVFSFPFYNQLL
TQTQIDLYNQLLGGISREAGTEKIKGLNEVLNLAIQKNDETAHIIASLPH
RFIPLFKQILSDRNTLSFILEEFKSDEEVIQSFCKYKTLLRNENVLETAE
ALFNELNSIDLTHIFISHKKLETISSALCDHWDTLRNALYERRISELTGK
ITKSAKEKVQRSLKHEDINLQEIISAAGKELSEAFKQKTSEILSHAHAAL
DQPLPTTLKKQEEKEILKSQLDSLLGLYHLLDWFAVDESNEVDPEFSARL
TGIKLEMEPSLSFYNKARNYATKKPYSVEKFKLNFQMPTLASGWDVNKEK
NNGAILFVKNGLYYLGIMPKQKGRYKALSFEPTEKTSEGFDKMYYDYFPD
AAKMIPKCSTQLKAVTAHFQTHTTPILLSNNFIEPLEITKEIYDLNNPEK
EPKKFQTAYAKKTGDQKGYREALCKWIDFTRDFLSKYTKTTSIDLSSLRP
SSQYKDLGEYYAELNPLLYHISFQRIAEKEIMDAVETGKLYLFQIYNKDF
AKGHHGKPNLHTLYWTGLFSPENLAKTSIKLNGQAELFYRPKSRMKRMAH
RLGEKMLNKKLKDQKTPIPDTLYQELYDYVNHRLSHDLSDEARALLPNVI
TKEVSHEIIKDRRFTSDKFFFHVPITLNYQAANSPSKFNQRVNAYLKEHP
ETPIIGIDRGERNLIYITVIDSTGKILEQRSLNTIQQFDYQKKLDNREKE
RVAARQAWSVVGTIKDLKQGYLSQVIHEIVDLMIHYQAVVVLENLNFGFK
SKRTGIAEKAVYQQFEKMLIDKLNCLVLKDYPAEKVGGVLNPYQLTDQFT
SFAKMGTQSGFLFYVPAPYTSKIDPLTGFVDPFVWKTIKNHESRKHFLEG
FDFLHYDVKTGDFILHFKMNRNLSFQRGLPGFMPAWDIVFEKNETQFDAK
GTPFIAGKRIVPVIENHRFTGRYRDLYPANELIALLEEKGIVFRDGSNIL
PKLLENDDSHAIDTMVALIRSVLQMRNSNAATGEDYINSPVRDLNGVCFD
SRFQNPEWPMDADANGAYHIALKGQLLLNHLKESKDLKLQNGISNQDWLA
YIQELRNGRSSDDEATADSQHAAPPKKKRKVGGSGGSGGSGGSGGSGGSG
GSGGSLEHHHHHH

SEQ ID NO.: 24

MGSSSSGLVPRGSHMASMTGGQQMGRDPTQFEGFTNLYQVSKTLRFELIP
QGKTLKHIQEQGFIEEDKARNDHYKELKPIIDRIYKTYADQCLQLVQLDW
ENLSAAIDSYRKEKTEETRNALIEEQATYRNAIHDYFIGRTDNLTDAINK
RHAEIYKGLFKAELFNGKVLKQLGTVTTTEHENALLRSFDKFTTYFSGFY
ENRKNVFSAEDISTAIPHRIVQDNFPKFKENCHIFTRLITAVPSLREHFE
NVKKAIGIFVSTSIEEVFSFPFYNQLLTQTQIDLYNQLLGGISREAGTEK
IKGLNEVLNLAIQKNDETAHIIASLPHRFIPLFKQILSDRNTLSFILEEF
KSDEEVIQSFCKYKTLLRNENVLETAEALFNELNSIDLTHIFISHKKLET
ISSALCDHWDTLRNALYERRISELTGKITKSAKEKVQRSLKHEDINLQEI
ISAAGKELSEAFKQKTSEILSHAHAALDQPLPTTLKKQEEKEILKSQLDS
LLGLYHLLDWFAVDESNEVDPEFSARLTGIKLEMEPSLSFYNKARNYATK
KPYSVEKFKLNFQMPTLASGWDVNKEKNNGAILFVKNGLYYLGIMPKQKG
RYKALSFEPTEKTSEGFDKMYYDYFPDAAKMIPKCSTQLKAVTAHFQTHT
TPILLSNNFIEPLEITKEIYDLNNPEKEPKKFQTAYAKKTGDQKGYREAL
CKWIDFTRDFLSKYTKTTSIDLSSLRPSSQYKDLGEYYAELNPLLYHISF
QRIAEKEIMDAVETGKLYLFQIYNKDFAKGHHGKPNLHTLYWTGLFSPEN
LAKTSIKLNGQAELFYRPKSRMKRMAHRLGEKMLNKKLKDQKTPIPDTLY
QELYDYVNHRLSHDLSDEARALLPNVITKEVSHEIIKDRRFTSDKFFFHV
PITLNYQAANSPSKFNQRVNAYLKEHPETPIIGIDRGERNLIYITVIDST
GKILEQRSLNTIQQFDYQKKLDNREKERVAARQAWSVVGTIKDLKQGYLS
QVIHEIVDLMIHYQAVVVLENLNFGFKSKRTGIAEKAVYQQFEKMLIDKL
NCLVLKDYPAEKVGGVLNPYQLTDQFTSFAKMGTQSGFLFYVPAPYTSKI
DPLTGFVDPFVWKTIKNHESRKHFLEGFDFLHYDVKTGDFILHFKMNRNL
SFQRGLPGFMPAWDIVFEKNETQFDAKGTPFIAGKRIVPVIENHRFTGRY
RDLYPANELIALLEEKGIVFRDGSNILPKLLENDDSHAIDTMVALIRSVL
QMRNSNAATGEDYINSPVRDLNGVCFDSRFQNPEWPMDADANGAYHIALK
GQLLLNHLKESKDLKLQNGISNQDWLAYIQELRNGRSSDDEATADSQHAA
PPKKKRKVGGSGGSGGSGGSGGSGGSGGSGGSLEHHHHHH

SEQ ID NO.: 25

MPPPKRPRLDGIHGVPAATQFEGFTNLYQVSKTLRFELIPQGKTLKHIQE
QGFIEEDKARNDHYKELKPIIDRIYKTYADQCLQLVQLDWENLSAAIDSY
RKEKTEETRNALIEEQATYRNAIHDYFIGRTDNLTDAINKRHAEIYKGLF
KAELFNGKVLKQLGTVTTTEHENALLRSFDKFTTYFSGFYENRKNVFSAE
DISTAIPHRIVQDNFPKFKENCHIFTRLITAVPSLREHFENVKKAIGIFV
STSIEEVFSFPFYNQLLTQTQIDLYNQLLGGISREAGTEKIKGLNEVLNL
AIQKNDETAHIIASLPHRFIPLFKQILSDRNTLSFILEEFKSDEEVIQSF
CKYKTLLRNENVLETAEALFNELNSIDLTHIFISHKKLETISSALCDHWD
TLRNALYERRISELTGKITKSAKEKVQRSLKHEDINLQEIISAAGKELSE
AFKQKTSEILSHAHAALDQPLPTTLKKQEEKEILKSQLDSLLGLYHLLDW
FAVDESNEVDPEFSARLTGIKLEMEPSLSFYNKARNYATKKPYSVEKFKL
NFQMPTLASGWDVNKEKNNGAILFVKNGLYYLGIMPKQKGRYKALSFEPT
EKTSEGFDKMYYDYFPDAAKMIPKCSTQLKAVTAHFQTHTTPILLSNNFI
EPLEITKEIYDLNNPEKEPKKFQTAYAKKTGDQKGYREALCKWIDFTRDF
LSKYTKTTSIDLSSLRPSSQYKDLGEYYAELNPLLYHISFQRIAEKEIMD
AVETGKLYLFQIYNKDFAKGHHGKPNLHTLYWTGLFSPENLAKTSIKLNG
QAELFYRPKSRMKRMAHRLGEKMLNKKLKDQKTPIPDTLYQELYDYVNHR
LSHDLSDEARALLPNVITKEVSHEIIKDRRFTSDKFFFHVPITLNYQAAN
SPSKFNQRVNAYLKEHPETPIIGIDRGERNLIYITVIDSTGKILEQRSLN
TIQQFDYQKKLDNREKERVAARQAWSVVGTIKDLKQGYLSQVIHEIVDLM
IHYQAVVVLENLNFGFKSKRTGIAEKAVYQQFEKMLIDKLNCLVLKDYPA
EKVGGVLNPYQLTDQFTSFAKMGTQSGFLFYVPAPYTSKIDPLTGFVDPF
VWKTIKNHESRKHFLEGFDFLHYDVKTGDFILHFKMNRNLSFQRGLPGFM
PAWDIVFEKNETQFDAKGTPFIAGKRIVPVIENHRFTGRYRDLYPANELI
ALLEEKGIVFRDGSNILPKLLENDDSHAIDTMVALIRSVLQMRNSNAATG
EDYINSPVRDLNGVCFDSRFQNPEWPMDADANGAYHIALKGQLLLNHLKE
SKDLKLQNGISNQDWLAYIQELRNGRSSDDEATADSQHAAPPKKKRKVGG
SGGSGGSGGSGGSGGSGGSGGSLEHHHHHH

SEQ ID NO.: 26

MSSDDEATADSQHAAPPKKKRKVGIHGVPAATQFEGFTNLYQVSKTLRFE
LIPQGKTLKHIQEQGFIEEDKARNDHYKELKPIIDRIYKTYADQCLQLVQ
LDWENLSAAIDSYRKEKTEETRNALIEEQATYRNAIHDYFIGRTDNLTDA
INKRHAEIYKGLFKAELFNGKVLKQLGTVTTTEHENALLRSFDKFTTYFS
GFYENRKNVFSAEDISTAIPHRIVQDNFPKFKENCHIFTRLITAVPSLRE
HFENVKKAIGIFVSTSIEEVFSFPFYNQLLTQTQIDLYNQLLGGISREAG
TEKIKGLNEVLNLAIQKNDETAHIIASLPHRFIPLFKQILSDRNTLSFIL
EEFKSDEEVIQSFCKYKTLLRNENVLETAEALFNELNSIDLTHIFISHKK
LETISSALCDHWDTLRNALYERRISELTGKITKSAKEKVQRSLKHEDINL
QEIISAAGKELSEAFKQKTSEILSHAHAALDQPLPTTLKKQEEKEILKSQ
LDSLLGLYHLLDWFAVDESNEVDPEFSARLTGIKLEMEPSLSFYNKARNY
ATKKPYSVEKFKLNFQMPTLASGWDVNKEKNNGAILFVKNGLYYLGIMPK
QKGRYKALSFEPTEKTSEGFDKMYYDYFPDAAKMIPKCSTQLKAVTAHFQ
THTTPILLSNNFIEPLEITKEIYDLNNPEKEPKKFQTAYAKKTGDQKGYR
EALCKWIDFTRDFLSKYTKTTSIDLSSLRPSSQYKDLGEYYAELNPLLYH
ISFQRIAEKEIMDAVETGKLYLFQIYNKDFAKGHHGKPNLHTLYWTGLFS
PENLAKTSIKLNGQAELFYRPKSRMKRMAHRLGEKMLNKKLKDQKTPIPD
TLYQELYDYVNHRLSHDLSDEARALLPNVITKEVSHEIIKDRRFTSDKFF
FHVPITLNYQAANSPSKFNQRVNAYLKEHPETPIIGIDRGERNLIYITVI
DSTGKILEQRSLNTIQQFDYQKKLDNREKERVAARQAWSVVGTIKDLKQG
YLSQVIHEIVDLMIHYQAVVVLENLNFGFKSKRTGIAEKAVYQQFEKMLI
DKLNCLVLKDYPAEKVGGVLNPYQLTDQFTSFAKMGTQSGFLFYVPAPYT
SKIDPLTGFVDPFVWKTIKNHESRKHFLEGFDFLHYDVKTGDFILHFKMN
RNLSFQRGLPGFMPAWDIVFEKNETQFDAKGTPFIAGKRIVPVIENHRFT
GRYRDLYPANELIALLEEKGIVFRDGSNILPKLLENDDSHAIDTMVALIR
SVLQMRNSNAATGEDYINSPVRDLNGVCFDSRFQNPEWPMDADANGAYHI
ALKGQLLLNHLKESKDLKLQNGISNQDWLAYIQELRNGRSSDDEATADSQ
HAAPPKKKRKVGGSGGSGGSGGSGGSGGSGGSGGSLEHHHHHH

SEQ ID NO.: 27

MTQFEGFTNLYQVSKTLRFELIPQGKTLKHIQEQGFIEEDKARNDHYKEL
KPIIDRIYKTYADQCLQLVQLDWENLSAAIDSYRKEKTEETRNALIEEQA
TYRNAIHDYFIGRTDNLTDAINKRHAEIYKGLFKAELFNGKVLKQLGTVT
TTEHENALLRSFDKFTTYFSGFYENRKNVFSAEDISTAIPHRIVQDNFPK
FKENCHIFTRLITAVPSLREHFENVKKAIGIFVSTSIEEVFSFPFYNQLL
TQTQIDLYNQLLGGISREAGTEKIKGLNEVLNLAIQKNDETAHIIASLPH
RFIPLFKQILSDRNTLSFILEEFKSDEEVIQSFCKYKTLLRNENVLETAE
ALFNELNSIDLTHIFISHKKLETISSALCDHWDTLRNALYERRISELTGK
ITKSAKEKVQRSLKHEDINLQEIISAAGKELSEAFKQKTSEILSHAHAAL
DQPLPTTLKKQEEKEILKSQLDSLLGLYHLLDWFAVDESNEVDPEFSARL
TGIKLEMEPSLSFYNKARNYATKKPYSVEKFKLNFQMPTLASGWDVNKEK
NNGAILFVKNGLYYLGIMPKQKGRYKALSFEPTEKTSEGFDKMYYDYFPD
AAKMIPKCSTQLKAVTAHFQTHTTPILLSNNFIEPLEITKEIYDLNNPEK
EPKKFQTAYAKKTGDQKGYREALCKWIDFTRDFLSKYTKTTSIDLSSLRP
SSQYKDLGEYYAELNPLLYHISFQRIAEKEIMDAVETGKLYLFQIYNKDF
AKGHHGKPNLHTLYWTGLFSPENLAKTSIKLNGQAELFYRPKSRMKRMAH
RLGEKMLNKKLKDQKTPIPDTLYQELYDYVNHRLSHDLSDEARALLPNVI
TKEVSHEIIKDRRFTSDKFFFHVPITLNYQAANSPSKFNQRVNAYLKEHP
ETPIIGIDRGERNLIYITVIDSTGKILEQRSLNTIQQFDYQKKLDNREKE
RVAARQAWSVVGTIKDLKQGYLSQVIHEIVDLMIHYQAVVVLENLNFGFK
SKRTGIAEKAVYQQFEKMLIDKLNCLVLKDYPAEKVGGVLNPYQLTDQFT
SFAKMGTQSGFLFYVPAPYTSKIDPLTGFVDPFVWKTIKNHESRKHFLEG
FDFLHYDVKTGDFILHFKMNRNLSFQRGLPGFMPAWDIVFEKNETQFDAK
GTPFIAGKRIVPVIENHRFTGRYRDLYPANELIALLEEKGIVFRDGSNIL
PKLLENDDSHAIDTMVALIRSVLQMRNSNAATGEDYINSPVRDLNGVCFD
SRFQNPEWPMDADANGAYHIALKGQLLLNHLKESKDLKLQNGISNQDWLA
YIQELRNGRKRPAATKKAGQAKKKKGGSGGSGGSGGSGGSGGSGGSGGSL
EHHHHHH

SEQ ID NO.: 28

MTQFEGFTNLYQVSKTLRFELIPQGKTLKHIQEQGFIEEDKARNDHYKEL
KPIIDRIYKTYADQCLQLVQLDWENLSAAIDSYRKEKTEETRNALIEEQA
TYRNAIHDYFIGRTDNLTDAINKRHAEIYKGLFKAELFNGKVLKQLGTVT
TTEHENALLRSFDKFTTYFSGFYENRKNVFSAEDISTAIPHRIVQDNFPK
FKENCHIFTRLITAVPSLREHFENVKKAIGIFVSTSIEEVFSFPFYNQLL
TQTQIDLYNQLLGGISREAGTEKIKGLNEVLNLAIQKNDETAHIIASLPH
RFIPLFKQILSDRNTLSFILEEFKSDEEVIQSFCKYKTLLRNENVLETAE
ALFNELNSIDLTHIFISHKKLETISSALCDHWDTLRNALYERRISELTGK
ITKSAKEKVQRSLKHEDINLQEIISAAGKELSEAFKQKTSEILSHAHAAL
DQPLPTTLKKQEEKEILKSQLDSLLGLYHLLDWFAVDESNEVDPEFSARL
TGIKLEMEPSLSFYNKARNYATKKPYSVEKFKLNFQMPTLASGWDVNKEK
NNGAILFVKNGLYYLGIMPKQKGRYKALSFEPTEKTSEGFDKMYYDYFPD
AAKMIPKCSTQLKAVTAHFQTHTTPILLSNNFIEPLEITKEIYDLNNPEK
EPKKFQTAYAKKTGDQKGYREALCKWIDFTRDFLSKYTKTTSIDLSSLRP
SSQYKDLGEYYAELNPLLYHISFQRIAEKEIMDAVETGKLYLFQIYNKDF
AKGHHGKPNLHTLYWTGLFSPENLAKTSIKLNGQAELFYRPKSRMKRMAH
RLGEKMLNKKLKDQKTPIPDTLYQELYDYVNHRLSHDLSDEARALLPNVI
TKEVSHEIIKDRRFTSDKFFFHVPITLNYQAANSPSKFNQRVNAYLKEHP
ETPIIGIDRGERNLIYITVIDSTGKILEQRSLNTIQQFDYQKKLDNREKE
RVAARQAWSVVGTIKDLKQGYLSQVIHEIVDLMIHYQAVVVLENLNFGFK
SKRTGIAEKAVYQQFEKMLIDKLNCLVLKDYPAEKVGGVLNPYQLTDQFT
SFAKMGTQSGFLFYVPAPYTSKIDPLTGFVDPFVWKTIKNHESRKHFLEG
FDFLHYDVKTGDFILHFKMNRNLSFQRGLPGFMPAWDIVFEKNETQFDAK
GTPFIAGKRIVPVIENHRFTGRYRDLYPANELIALLEEKGIVFRDGSNIL
PKLLENDDSHAIDTMVALIRSVLQMRNSNAATGEDYINSPVRDLNGVCFD
SRFQNPEWPMDADANGAYHIALKGQLLLNHLKESKDLKLQNGISNQDWLA
YIQELRNGRKRTADGSEFESPKKKRKVEGGSGGSGGSGGSGGSGGSGGSG
GSLEHHHHHH

SEQ ID NO.: 29

MTQFEGFTNLYQVSKTLRFELIPQGKTLKHIQEQGFIEEDKARNDHYKEL
KPIIDRIYKTYADQCLQLVQLDWENLSAAIDSYRKEKTEETRNALIEEQA
TYRNAIHDYFIGRTDNLTDAINKRHAEIYKGLFKAELFNGKVLKQLGTVT
TTEHENALLRSFDKFTTYFSGFYENRKNVFSAEDISTAIPHRIVQDNFPK
FKENCHIFTRLITAVPSLREHFENVKKAIGIFVSTSIEEVFSFPFYNQLL
TQTQIDLYNQLLGGISREAGTEKIKGLNEVLNLAIQKNDETAHIIASLPH
RFIPLFKQILSDRNTLSFILEEFKSDEEVIQSFCKYKTLLRNENVLETAE
ALFNELNSIDLTHIFISHKKLETISSALCDHWDTLRNALYERRISELTGK
ITKSAKEKVQRSLKHEDINLQEIISAAGKELSEAFKQKTSEILSHAHAAL
DQPLPTTLKKQEEKEILKSQLDSLLGLYHLLDWFAVDESNEVDPEFSARL
TGIKLEMEPSLSFYNKARNYATKKPYSVEKFKLNFQMPTLASGWDVNKEK
NNGAILFVKNGLYYLGIMPKQKGRYKALSFEPTEKTSEGFDKMYYDYFPD
AAKMIPKCSTQLKAVTAHFQTHTTPILLSNNFIEPLEITKEIYDLNNPEK
EPKKFQTAYAKKTGDQKGYREALCKWIDFTRDFLSKYTKTTSIDLSSLRP
SSQYKDLGEYYAELNPLLYHISFQRIAEKEIMDAVETGKLYLFQIYNKDF
AKGHHGKPNLHTLYWTGLFSPENLAKTSIKLNGQAELFYRPKSRMKRMAH
RLGEKMLNKKLKDQKTPIPDTLYQELYDYVNHRLSHDLSDEARALLPNVI
TKEVSHEIIKDRRFTSDKFFFHVPITLNYQAANSPSKFNQRVNAYLKEHP
ETPIIGIDRGERNLIYITVIDSTGKILEQRSLNTIQQFDYQKKLDNREKE
RVAARQAWSVVGTIKDLKQGYLSQVIHEIVDLMIHYQAVVVLENLNFGFK
SKRTGIAEKAVYQQFEKMLIDKLNCLVLKDYPAEKVGGVLNPYQLTDQFT
SFAKMGTQSGFLFYVPAPYTSKIDPLTGFVDPFVWKTIKNHESRKHFLEG
FDFLHYDVKTGDFILHFKMNRNLSFQRGLPGFMPAWDIVFEKNETQFDAK
GTPFIAGKRIVPVIENHRFTGRYRDLYPANELIALLEEKGIVFRDGSNIL
PKLLENDDSHAIDTMVALIRSVLQMRNSNAATGEDYINSPVRDLNGVCFD
SRFQNPEWPMDADANGAYHIALKGQLLLNHLKESKDLKLQNGISNQDWLA
YIQELRNGRSSDDEATADSQHAAPPKKKRKVGGSGGSKRTADGSEFESPK
KKRKVEGGSGGSGGSGGSGGSGGSGGSGGSLEHHHHHH

SEQ ID NO.: 30

MTQFEGFTNLYQVSKTLRFELIPQGKTLKHIQEQGFIEEDKARNDHYKEL
KPIIDRIYKTYADQCLQLVQLDWENLSAAIDSYRKEKTEETRNALIEEQA
TYRNAIHDYFIGRTDNLTDAINKRHAEIYKGLFKAELFNGKVLKQLGTVT
TTEHENALLRSFDKFTTYFSGFYENRKNVFSAEDISTAIPHRIVQDNFPK
FKENCHIFTRLITAVPSLREHFENVKKAIGIFVSTSIEEVFSFPFYNQLL
TQTQIDLYNQLLGGISREAGTEKIKGLNEVLNLAIQKNDETAHIIASLPH
RFIPLFKQILSDRNTLSFILEEFKSDEEVIQSFCKYKTLLRNENVLETAE
ALFNELNSIDLTHIFISHKKLETISSALCDHWDTLRNALYERRISELTGK
ITKSAKEKVQRSLKHEDINLQEIISAAGKELSEAFKQKTSEILSHAHAAL
DQPLPTTLKKQEEKEILKSQLDSLLGLYHLLDWFAVDESNEVDPEFSARL
TGIKLEMEPSLSFYNKARNYATKKPYSVEKFKLNFQMPTLASGWDVNKEK
NNGAILFVKNGLYYLGIMPKQKGRYKALSFEPTEKTSEGFDKMYYDYFPD
AAKMIPKCSTQLKAVTAHFQTHTTPILLSNNFIEPLEITKEIYDLNNPEK
EPKKFQTAYAKKTGDQKGYREALCKWIDFTRDFLSKYTKTTSIDLSSLRP
SSQYKDLGEYYAELNPLLYHISFQRIAEKEIMDAVETGKLYLFQIYNKDF
AKGHHGKPNLHTLYWTGLFSPENLAKTSIKLNGQAELFYRPKSRMKRMAH
RLGEKMLNKKLKDQKTPIPDTLYQELYDYVNHRLSHDLSDEARALLPNVI
TKEVSHEIIKDRRFTSDKFFFHVPITLNYQAANSPSKFNQRVNAYLKEHP
ETPIIGIDRGERNLIYITVIDSTGKILEQRSLNTIQQFDYQKKLDNREKE
RVAARQAWSVVGTIKDLKQGYLSQVIHEIVDLMIHYQAVVVLENLNFGFK
SKRTGIAEKAVYQQFEKMLIDKLNCLVLKDYPAEKVGGVLNPYQLTDQFT
SFAKMGTQSGFLFYVPAPYTSKIDPLTGFVDPFVWKTIKNHESRKHFLEG
FDFLHYDVKTGDFILHFKMNRNLSFQRGLPGFMPAWDIVFEKNETQFDAK
GTPFIAGKRIVPVIENHRFTGRYRDLYPANELIALLEEKGIVFRDGSNIL
PKLLENDDSHAIDTMVALIRSVLQMRNSNAATGEDYINSPVRDLNGVCFD
SRFQNPEWPMDADANGAYHIALKGQLLLNHLKESKDLKLQNGISNQDWLA
YIQELRNGRKRPAATKKAGQAKKKKGGSGGSKRTADGSEFESPKKKRKVE
GGSGGSGGSGGSGGSGGSGGSGGSLEHHHHHH

### Example 2

### Novel Cpf1 Mutants Enhance the DNA Cleavage Activity at TTTT PAM Site in the Bacterial-Based Activity Assay

[0095] The following Example demonstrates the enhanced activity of the invention at both TTTT and TTTC PAM sites in a bacterial-based activity assay (FIG. 2). The screening strains harboring the toxin plasmid were transformed with WT, M537R or F870L AsCpf1 expression plasmid. After recovery and IPTG induction, cells were plated on LB-Chloramphenicol media with or without arabinose. The degree of cell survival under the arabinose selection compared to the transformation input control (without arabinose) is indicative of the cleavage activity of Cpf1 variants at the HPRT-38346 protospacer on the toxin plasmid, in the context of TTTT or TTTC PAM.

[0096] For WT-Cpf1, the survival rate of transformed E.coli at TTTC is significantly higher than the TTTT PAM, which is in good agreement with the prior knowledge that the TTTT is a low activity PAM site^{[6]}. In contrast, both M537R and F870L increased the survival rate at TTTT PAM, indicating these mutants broadened the PAM compatibility of AsCpf1 at this alternative PAM site. More importantly, the survival rate of both mutants at the canonical TTTC PAM is even higher than the WT-Cpf1, suggesting these mutants generally enhanced the performance of AsCpf1 protein at other TTTV sites as well. Given these positive results, individual AsCpf1 variant and the double mutant (M537R/F870L) were expressed and purified to determine their intrinsic cleavage activities in vitro.

### Example 3

### Novel Cpf1 Mutants Enhances the Intrinsic DNA Cleavage Activity at TTTT PAM Sites In Vitro

[0097] The intrinsic DNA cleavage activities of AsCpf1 variants (M537R, F870L and M537R/F870L) were compared to the wild type protein using in vitro cleavage assay. Briefly, the Cpf1-crRNA ribonucleoprotein (RNP) complex was first assembled by incubating the purified proteins (FIG. 3A) with HPRT-38346 crRNA in 1× cleavage buffer (20 mM HEPES, pH 7.5, 150 mM KCl, 5 mM MgCl₂, 10% Glycerol, and 1 mM DTT) for 15 minutes at 37° C. The cleavage reactions were initiated by titrating RNP complex (8˜500 nM) in 10 nM dsDNA substrate containing the HPRT-38346 protospacer, in the context of TTTC or TTTT PAM. Cleavage reactions at various time points were sampled and quenched by 50 mM EDTA. After removing the AsCpf1 protein by Proteanise K treatment (56° C., 30 minutes), reactions were resolved using capillary electrophoresis (Fragment Analyzer, AATI). The relative concentration of cleavage products and uncleaved dsDNA were quantified to calculate the percentage of DNA cleavage.

[0098] The intrinsic DNA cleavage activities of WT and Cpf1 variants at the TTTT and TTTC PAM sites were compared in FIG. 3B. Only a single RNP concentration (31 nM) at 20 seconds time-point was shown for simplicity. As expected, the single-nucleotide change of PAM sequence from TTTC to TTTT reduced the cleavage activity of WT-Cpf1 from ˜95% to ˜40%. Consistent with the observations in the bacterial-based activity assay, both mutants significantly increased the DNA cleavage at TTTT PAM, while maintaining high activity at TTTC PAM (FIG. 3B). The double-mutant (M537R/F870L) has similar activities to the M537R in this assay. However, it is worth to note that this is likely due to the limited resolution of this particular assay, to resolve further differences among those high-activity variants. Overall, these results demonstrated that the reported mutations improved the activity of Cpf1 by enhancing the intrinsic DNA cleavage. Therefore, we anticipate that the observed benefits of these mutants will be broadly applicable and independent of the delivery methods and/or cellular contexts of the specific experiment.

### Example 4

### Novel Mutants Broadly Enhance the Targeting Efficiency of TTTN PAM Sites in Human Cell Line

[0099] The following Example demonstrates the ability of the invention to increase the efficiency of gene editing at TTTN PAM sites when the Cpf1-crRNA complex is delivered into cells as an RNP.

[0100] CRISPR/Cpf1 cellular editing experiments were performed by first forming 4 mM RNP complex with purified Cpf1 protein and the Alt-R™ crRNAs in Opti-MEM for 5 min at 25° C. The targeted protospacers and PAM sequences in CTNNB1 loci are shown in Table 2. RNP complexes were then transfected into HEK293 cells by Lonza nucleofection. Experiments were performed in biological triplicate. After 48 hr at 37° C. with 5% CO₂, adherent cells were washed with 0.1 ml PBS and lysed with 0.05 ml QuickExtract' DNA extraction solution. Cell lysates were incubated at 65° C. for 15 min followed by heat-inactivation at 98° C. for 3 min. Crude DNA samples were then diluted 3-fold with 0.1 ml ddH₂O and used as PCR templates. PCR primers are indicated in Table 2. PCR was used to amplify 1 kb fragments of the CTNNB1 loci using the KAPA HiFi DNA Polymerase and the following cycling parameters: 95^{5:00} (98^{0:20}, 64^{0:15}, 72^{0:30}) repeated 29 times, 72^{2:00}.

[0101] Heteroduplexes were formed using the following cycling parameters: 95^{10:00} cooled to 85 over 1 min, 85^{1:00} cooled to 75 over 1 min, 75^{1:00} cooled to 65 over 1 min, 65^{1:00} cooled to 55 over 1 min, 55^{1:00} cooled to 45 over 1 min, 45^{1:00} cooled to 35 over 1 min, 35^{1:00} cooled to 25 over 1 min, 25^{1:00}. Heteroduplexes were cleaved by the addition of 2U T7 Endonuclease I (New England Biolabs) for 1 hr at 37 C, and cut products were analyzed by capillary electrophoresis (Fragment Analyzer, Advanced Analytical).

TABLE 2
Sequence of DNA target sites and primer used for
PCR amplification (SEQ ID NOs.: 31-58).

| Name | Sequence (5′-3′) | SEQ ID NO.: |
|---|---|---|
| HPRT38346 | TTTTACATAAAACTCTTTTAGGTTA | SEQ ID NO.: |
| TTTT PAM | | 31 |
| HPRT38346 | TTTCACATAAAACTCTTTTAGGTTA | SEQ ID NO.: |
| TTTC PAM | | 32 |
| CTNNB1 | TTTTCCCCTCCCTGGCTTTTATTAT | SEQ ID NO.: |
| 111-S | | 33 |
| CTNNB1 | TTTCCCCTCCCTGGCTTTTATTATT | SEQ ID NO.: |
| 112-S | | 34 |
| CTNNB1 | TTTTATTATTACAACTCTGTGCTTT | SEQ ID NO.: |
| 127-S | | 35 |
| CTNNB1 | TTTATTATTACAACTCTGTGCTTTT | SEQ ID NO.: |
| 128-S | | 36 |
| CTNNB1 | TTTTTCATCACCATCCTGAATATCT | SEQ ID NO.: |
| 149-S | | 37 |
| CTNNB1 | TTTTCATCACCATCCTGAATATCTA | SEQ ID NO.: |
| 150-S | | 38 |
| CTNNB1 | TTTCATCACCATCCTGAATATCTAT | SEQ ID NO.: |
| 151-S | | 39 |
| CTNNB1 | TTTATACTATTAATAAAAAGACATT | SEQ ID NO.: |
| 184-S | | 40 |
| CTNNB1 | TTTATTAATAGTATAAATATTAATT | SEQ ID NO.: |
| 193-AS | | 41 |
| CTNNB1 | TTTTATTAATAGTATAAATATTAAT | SEQ ID NO.: |
| 194-AS | | 42 |
| CTNNB1 | TTTTTATTAATAGTATAAATATTAA | SEQ ID NO.: |
| 195-AS | | 43 |
| CTNNB1 | TTTTTGGTAAGGAGGAGTTTTCACT | SEQ ID NO.: |
| 207-S | | 44 |
| CTNNB1 | TTTTGGTAAGGAGGAGTTTTCACTG | SEQ ID NO.: |
| 208-S | | 45 |
| CTNNB1 | TTTGGTAAGGAGGAGTTTTCACTGA | SEQ ID NO.: |
| 209-S | | 46 |
| CTNNB1 | TTTTCACTGAAGTTCAGCAGTGATG | SEQ ID NO.: |
| 224-S | | 47 |
| CTNNB1 | TTTCACTGAAGTTCAGCAGTGATGG | SEQ ID NO.: |
| 225-S | | 48 |
| CTNNB1 | TTTCACTAACCTGGTAAAAGAGGAT | SEQ ID NO.: |
| 291-S | | 49 |
| CTNNB1 | TTTACCAGGTTAGTGAAACGCAGAC | SEQ ID NO.: |
| 301-AS | | 50 |
| CTNNB1 | TTTTACCAGGTTAGTGAAACGCAGA | SEQ ID NO.: |
| 302-AS | | 51 |
| CTNNB1 | TTTTTTTTGTGGGTGTAATAGTGAC | SEQ ID NO.: |
| 321-S | | 52 |
| CTNNB1 | TTTTTTTGTGGGTGTAATAGTGACA | SEQ ID NO.: |
| 322-S | | 53 |
| CTNNB1 | TTTTTTGTGGGTGTAATAGTGACAT | SEQ ID NO.: |
| 323-S | | 54 |
| CTNNB1 | TTTTTGTGGGTGTAATAGTGACATT | SEQ ID NO.: |
| 324-S | | 55 |
| CTNNB1 | TTTTGTGGGTGTAATAGTGACATTT | SEQ ID NO.: |
| 325-S | | 56 |
| CTNNB1_FWD | TCCCACTGTACCTCTGTTATCCA | SEQ ID NO.: |
| | | 57 |
| CTNNB1_REV | TGGTCCTCGTCATTTAGCAGTTT | SEQ ID NO.: |
| | | 58 |

[0102] Referring to FIG. 4, T7EI assay revealed significant improvement of the targeting efficiency by M537R and F870L mutations. First, M537R, F870L or the double-mutant (M537R/F870L) enabled efficient cleavage at all 15 sites with TTTT PAM, where 11 of 15 have no detectable cleavage by WT-Cpf1. For other sites with canonical TTTV PAM, these variants maintained or improved the targeting efficiency. The benefit is particularly significant at those low-activity sites, such as CTNNB1 111-s (3-fold improvement over WT). Among these variants, the double-mutant (M537R/F870) has the most consistent improvement of targeting efficiency across all tested sites, where the singly mutants exhibited more site-dependent variations, such as F870L at 323-S (no activity, same as WT). Overall, the described invention exhibits vastly superior on-target potency than the WT-Cpf1.

### Example 5

### High-Throughput Measurement of the DNA Cleavage Activity of AsCas12a Variants at TTTT PAM Site in E. coli

[0103] The following Example demonstrates the robustness of our novel high-throughput screening strategy to directly measure the cleavage activity of thousands AsCas12a variants at TTTT PAM site in the bacterial-based activity assay (FIG. 5). FIG. 5A-F shows exemplary high-throughput phenotype measurement of AsCas12a point mutations by deep-scanning mutagenesis. A library encompassing every possible single point mutation of AsCas12a in the targeted region (499-640 and 840-913) was generated in the context of WT-AsCas12a or M537R/F870L-AsCas12a. The relative survival rate of each variant over the reference protein in an E. coil-based activity assay was determined by deep-sequencing. The phenotype of individual point mutations was measured under multiple selection stringencies in the context of M537R/F870L (condition 1 and 2), and a third condition in the WT-AsCas12a background (condition 3). As shown in FIG. 5A-C, the phenotype scores (i.e. natural logarithm of relative survival rate) of variants are positively correlated under different conditions (ρ˜0.7), demonstrating the consistency and reproducibility of this approach. As the positive control, only the M537R and F870L/I, but not any other substitutions at these positions, survived more than the WT-AsCas12a (FIG. 5D). Conversely, mutating R537 or L870 on the M537R/F870L-AsCas12a ubiquitously reduced the survival rate (FIG. 5E). These results demonstrated that the phenotype score measured by the bacterial screening reflects the DNA cleavage activity of previously characterized AsCas12a variants at TTTT PAM.

[0104] To further validate the result of our bacterial screen, we studied four point mutations of AsCas12a with greater survival rate than the reference under all three conditions (L505K, S510L, P569D and P599G, FIG. 5F), Of note, P599G has been shown to enhance the cleavage activity of AsCas12a at TTCC PAM. The other three point mutations have not been characterized by any published studies so far. We therefore measured the survival rate of E. coli cells transformed with plasmids expressing individual AsCas12a variant under selection. Compared to WT-AsCas12a, all selected point mutations increased the survival rate when targeting a TTTT-PAM site (FIG. 6). Unexpectedly, the benefits of these point mutations held true even in the context of M537R/F870L-AsCas12a, where the survival rate was further elevated (FIG. 7). Collectively, these results demonstrated that our high-throughput screening can accurately predict the phenotype of uncharacterized AsCas12a variants.

[0105] The phenotype scores of 3,194 AsCas12a variants with single point mutation covered by the screening with sufficient sequencing count are listed in Table 3. Overall, ˜60% exhibited some benefits (i.e. phenotype score>0) in one of the three condition.

TABLE 3
Summary of selected variants in different background conditions.¹

| | | | | | | | | Consistent |
|---|---|---|---|---|---|---|---|---|
| | Enrich. | Stand. | Enrich. | Stand. | Enrich. | Stand. | Any positive | positive |
| Mutant | Score (1) | Error (1) | Score (2) | Error (2) | Score (3) | Error (3) | enrichment? | enrichment? |
| R499C | 0.14 | 0.08 | 0.60 | 0.07 | 0.06 | 0.10 | Yes | Yes |
| R499L | 0.08 | 0.05 | 0.05 | 0.06 | 0.09 | 0.15 | Yes | Yes |
| R499K | 0.54 | 0.06 | 0.23 | 0.06 | 0.38 | 0.10 | Yes | Yes |
| R499A | −0.29 | 0.05 | 0.27 | 0.04 | 0.22 | 0.07 | Yes | No |
| R499N | 0.39 | 0.11 | −0.49 | 0.15 | −0.13 | 0.29 | Yes | No |
| R499D | 0.03 | 0.09 | −1.01 | 0.12 | −0.51 | 0.44 | Yes | No |
| R499Q | −0.10 | 0.08 | 0.42 | 0.07 | 0.19 | 0.20 | Yes | No |
| R499E | −0.23 | 0.06 | 0.50 | 0.05 | −0.10 | 0.10 | Yes | No |
| R499G | −0.11 | 0.03 | 0.12 | 0.03 | 0.14 | 0.06 | Yes | No |
| R499H | −0.45 | 0.11 | 0.50 | 0.09 | NA | NA | Yes | No |
| R499I | −0.14 | 0.10 | 0.09 | 0.09 | −0.18 | 0.13 | Yes | No |
| R499M | −0.44 | 0.09 | 0.50 | 0.07 | 0.27 | 0.21 | Yes | No |
| R499F | 0.01 | 0.15 | −0.31 | 0.17 | NA | NA | Yes | No |
| R499P | −0.56 | 0.08 | −0.06 | 0.07 | −0.70 | 0.26 | No | No |
| R499S | −0.14 | 0.05 | 0.02 | 0.05 | −0.04 | 0.06 | Yes | No |
| R499* | −0.76 | 0.10 | −0.61 | 0.10 | −1.06 | 0.18 | No | No |
| R499T | −0.01 | 0.07 | 0.56 | 0.06 | 0.23 | 0.16 | Yes | No |
| R499W | −0.27 | 0.05 | 0.11 | 0.05 | −0.53 | 0.11 | Yes | No |
| R499V | 0.09 | 0.05 | 0.09 | 0.05 | −0.10 | 0.14 | Yes | No |
| L500M | 0.01 | 0.05 | 0.30 | 0.05 | 0.28 | 0.12 | Yes | Yes |
| L500A | −0.27 | 0.04 | 0.21 | 0.03 | −0.15 | 0.07 | Yes | No |
| L500R | −0.35 | 0.03 | −0.40 | 0.03 | −0.47 | 0.05 | No | No |
| L500N | −1.11 | 0.14 | −0.60 | 0.12 | −0.50 | 0.16 | No | No |
| L500D | −1.03 | 0.08 | −1.98 | 0.13 | −1.26 | 0.19 | No | No |
| L500C | −0.19 | 0.05 | 0.26 | 0.05 | 0.00 | 0.10 | Yes | No |
| L500Q | −0.67 | 0.06 | −0.63 | 0.06 | −0.13 | 0.07 | No | No |
| L500E | −1.00 | 0.06 | −1.22 | 0.07 | −1.29 | 0.07 | No | No |
| L500G | −0.72 | 0.03 | −0.79 | 0.03 | −0.84 | 0.03 | No | No |
| L500H | −0.30 | 0.09 | 0.01 | 0.08 | 0.01 | 0.22 | Yes | No |
| L500I | −0.31 | 0.09 | 0.07 | 0.08 | 0.26 | 0.15 | Yes | No |
| L500K | −1.21 | 0.09 | −0.32 | 0.07 | −0.28 | 0.07 | No | No |
| L500F | −0.19 | 0.08 | −0.33 | 0.09 | 0.09 | 0.21 | Yes | No |
| L500P | −0.79 | 0.05 | −0.80 | 0.05 | −0.91 | 0.07 | No | No |
| L500S | −0.84 | 0.04 | −0.43 | 0.04 | −0.37 | 0.07 | No | No |
| L500* | −1.39 | 0.09 | −1.60 | 0.11 | −1.66 | 0.16 | No | No |
| L500T | −0.19 | 0.05 | −0.37 | 0.06 | −0.17 | 0.06 | No | No |
| L500W | −0.25 | 0.04 | −0.29 | 0.04 | 0.01 | 0.11 | Yes | No |
| L500Y | −0.01 | 0.09 | 0.04 | 0.09 | 0.05 | 0.22 | Yes | No |
| L500V | −0.13 | 0.03 | 0.11 | 0.03 | −0.03 | 0.06 | Yes | No |
| T501L | 0.18 | 0.04 | 0.32 | 0.04 | 0.12 | 0.07 | Yes | Yes |
| T501M | 0.32 | 0.07 | 0.35 | 0.07 | 0.17 | 0.29 | Yes | Yes |
| T501V | 0.22 | 0.06 | 0.29 | 0.06 | 0.13 | 0.20 | Yes | Yes |
| T501A | −0.06 | 0.03 | −0.13 | 0.03 | −0.07 | 0.10 | No | No |
| T501R | 0.01 | 0.03 | −0.16 | 0.03 | 0.54 | 0.07 | Yes | No |
| T501N | 0.69 | 0.14 | 0.16 | 0.15 | NA | NA | Yes | No |
| T501D | 0.12 | 0.12 | −0.12 | 0.13 | NA | NA | Yes | No |
| T501C | 0.52 | 0.09 | −0.40 | 0.11 | 0.31 | 0.26 | Yes | No |
| T501Q | −0.19 | 0.10 | −0.04 | 0.10 | −0.24 | 0.31 | No | No |
| T501E | −0.39 | 0.09 | 0.05 | 0.08 | −0.34 | 0.26 | Yes | No |
| T501G | 0.12 | 0.04 | 0.44 | 0.04 | −0.03 | 0.09 | Yes | No |
| T501I | 0.13 | 0.07 | 0.05 | 0.07 | −0.19 | 0.11 | Yes | No |
| T501K | −0.30 | 0.09 | 0.21 | 0.08 | 0.55 | 0.24 | Yes | No |
| T501F | 0.08 | 0.08 | −0.12 | 0.08 | −0.12 | 0.14 | Yes | No |
| T501P | −0.29 | 0.07 | 0.14 | 0.06 | −0.39 | 0.13 | Yes | No |
| T501S | 0.06 | 0.05 | 0.14 | 0.05 | −0.10 | 0.09 | Yes | No |
| T501* | −1.18 | 0.12 | −0.58 | 0.10 | −0.85 | 0.21 | No | No |
| T501W | −0.02 | 0.07 | 0.26 | 0.06 | −0.30 | 0.09 | Yes | No |
| T501Y | −0.08 | 0.12 | 0.11 | 0.12 | −0.29 | 0.29 | Yes | No |
| G502R | 0.14 | 0.05 | 0.28 | 0.05 | 0.98 | 0.07 | Yes | Yes |
| G502E | 0.42 | 0.08 | 0.17 | 0.08 | 0.19 | 0.30 | Yes | Yes |
| G502L | 0.45 | 0.07 | 0.10 | 0.07 | 0.00 | 0.11 | Yes | Yes |
| G502S | 0.08 | 0.06 | 0.23 | 0.06 | 0.16 | 0.12 | Yes | Yes |
| G502W | 0.14 | 0.07 | 0.65 | 0.06 | 0.36 | 0.14 | Yes | Yes |
| G502V | 0.21 | 0.05 | 0.21 | 0.05 | 0.13 | 0.07 | Yes | Yes |
| G502A | −0.05 | 0.05 | −0.34 | 0.05 | 0.08 | 0.07 | Yes | No |
| G502D | −0.14 | 0.08 | 0.37 | 0.07 | 0.10 | 0.15 | Yes | No |
| G502C | −0.17 | 0.08 | 0.23 | 0.08 | −0.04 | 0.13 | Yes | No |
| G502Q | 0.78 | 0.11 | 0.02 | 0.13 | −0.06 | 0.55 | Yes | No |
| G502H | 0.61 | 0.15 | 0.01 | 0.17 | NA | NA | Yes | No |
| G502M | −0.34 | 0.13 | 0.35 | 0.11 | NA | NA | Yes | No |
| G502F | NA | NA | NA | NA | 0.08 | 0.37 | Yes | No |
| G502P | −0.41 | 0.14 | 0.01 | 0.13 | NA | NA | Yes | No |
| G502* | −1.16 | 0.15 | −0.82 | 0.13 | NA | NA | Yes | No |
| G502T | 0.69 | 0.10 | −0.23 | 0.13 | 0.24 | 0.35 | Yes | No |
| I503A | −0.76 | 0.09 | 0.32 | 0.07 | −0.16 | 0.21 | Yes | No |
| I503R | −0.86 | 0.07 | −0.67 | 0.07 | −0.51 | 0.17 | No | No |
| I503N | −0.03 | 0.09 | −0.30 | 0.10 | −0.26 | 0.17 | No | No |
| I503D | −0.50 | 0.13 | −0.57 | 0.13 | NA | NA | Yes | No |
| I503C | −0.24 | 0.11 | 0.84 | 0.09 | 0.00 | 0.33 | Yes | No |
| I503E | NA | NA | NA | NA | −0.71 | 0.36 | Yes | No |
| I503G | −0.69 | 0.06 | −0.30 | 0.05 | −0.53 | 0.15 | No | No |
| I503L | 0.13 | 0.06 | −0.46 | 0.07 | −0.31 | 0.15 | Yes | No |
| I503K | 0.03 | 0.12 | −0.51 | 0.15 | NA | NA | Yes | No |
| I503M | −0.08 | 0.10 | −0.17 | 0.10 | −0.13 | 0.27 | No | No |
| I503F | −0.17 | 0.09 | −0.17 | 0.09 | −0.25 | 0.19 | No | No |
| I503S | −0.45 | 0.07 | −0.27 | 0.07 | −0.23 | 0.19 | No | No |
| I503T | −0.23 | 0.08 | 0.33 | 0.07 | 0.20 | 0.14 | Yes | No |
| I503W | −1.21 | 0.11 | −0.88 | 0.10 | −0.61 | 0.28 | No | No |
| I503V | −0.09 | 0.05 | 0.34 | 0.04 | −0.03 | 0.09 | Yes | No |
| K504A | −0.15 | 0.07 | −0.33 | 0.07 | −0.30 | 0.20 | No | No |
| K504R | −0.05 | 0.03 | 0.04 | 0.03 | −0.08 | 0.06 | Yes | No |
| K504N | 0.01 | 0.03 | −0.54 | 0.04 | −0.50 | 0.04 | Yes | No |
| K504C | −0.46 | 0.13 | 0.02 | 0.12 | NA | NA | Yes | No |
| K504Q | −0.16 | 0.05 | −0.25 | 0.05 | −0.22 | 0.07 | No | No |
| K504E | −0.03 | 0.05 | −0.32 | 0.06 | −0.65 | 0.11 | No | No |
| K504G | −0.84 | 0.05 | −0.46 | 0.05 | −0.52 | 0.15 | No | No |
| K504H | −0.59 | 0.13 | −0.01 | 0.11 | −0.51 | 0.16 | No | No |
| K504I | −0.07 | 0.08 | 0.12 | 0.07 | −0.31 | 0.14 | Yes | No |
| K504L | −0.39 | 0.05 | −0.05 | 0.05 | −0.10 | 0.14 | No | No |
| K504M | −0.32 | 0.08 | −0.06 | 0.08 | −0.06 | 0.10 | No | No |
| K504F | −0.71 | 0.14 | −0.24 | 0.12 | NA | NA | Yes | No |
| K504S | −0.50 | 0.08 | −0.45 | 0.08 | −0.19 | 0.23 | No | No |
| K504* | −0.43 | 0.09 | −0.59 | 0.10 | −0.76 | 0.15 | No | No |
| K504T | −0.22 | 0.08 | 0.08 | 0.07 | −0.15 | 0.14 | Yes | No |
| K504W | −0.48 | 0.08 | 0.09 | 0.07 | −0.53 | 0.24 | Yes | No |
| K504V | −0.48 | 0.05 | −0.27 | 0.05 | −0.36 | 0.12 | No | No |
| L505A | 0.61 | 0.05 | 0.50 | 0.05 | 0.47 | 0.13 | Yes | Yes |
| L505R | 0.40 | 0.03 | 0.56 | 0.03 | 0.81 | 0.05 | Yes | Yes |
| L505Q | 0.30 | 0.07 | 0.82 | 0.07 | 0.16 | 0.11 | Yes | Yes |
| L505E | 0.18 | 0.06 | 0.03 | 0.07 | 0.14 | 0.21 | Yes | Yes |
| L505G | 0.18 | 0.03 | 0.72 | 0.03 | 0.40 | 0.05 | Yes | Yes |
| L505H | 0.33 | 0.11 | 0.83 | 0.10 | 0.34 | 0.32 | Yes | Yes |
| L505K | 0.02 | 0.10 | 1.00 | 0.08 | 1.00 | 0.13 | Yes | Yes |
| L505S | 0.13 | 0.06 | 0.32 | 0.06 | 0.60 | 0.07 | Yes | Yes |
| L505N | −0.53 | 0.17 | 0.27 | 0.14 | NA | NA | Yes | No |
| L505D | −0.28 | 0.11 | 0.59 | 0.10 | 0.10 | 0.49 | Yes | No |
| L505C | 0.26 | 0.07 | −0.14 | 0.08 | 0.47 | 0.27 | Yes | No |
| L505M | −0.05 | 0.09 | −0.06 | 0.09 | −0.18 | 0.18 | No | No |
| L505F | −0.97 | 0.15 | 0.28 | 0.11 | −0.33 | 0.41 | Yes | No |
| L505P | −0.55 | 0.07 | −0.09 | 0.06 | −0.09 | 0.11 | No | No |
| L505T | −0.23 | 0.09 | 0.44 | 0.08 | 0.59 | 0.17 | Yes | No |
| L505W | −0.03 | 0.06 | 0.28 | 0.05 | −0.19 | 0.17 | Yes | No |
| L505V | −0.03 | 0.04 | 0.15 | 0.04 | 0.45 | 0.11 | Yes | No |
| E506A | 0.33 | 0.03 | 0.47 | 0.03 | 0.70 | 0.05 | Yes | Yes |
| E506R | 0.46 | 0.03 | 0.81 | 0.03 | 1.20 | 0.04 | Yes | Yes |
| E506N | 0.24 | 0.09 | 0.53 | 0.09 | 0.50 | 0.29 | Yes | Yes |
| E506C | 0.20 | 0.06 | 0.29 | 0.06 | 0.49 | 0.19 | Yes | Yes |
| E506Q | 0.09 | 0.07 | 0.74 | 0.06 | 0.33 | 0.15 | Yes | Yes |
| E506G | 0.24 | 0.02 | 0.39 | 0.02 | 0.53 | 0.03 | Yes | Yes |
| E506H | 0.35 | 0.09 | 0.10 | 0.10 | 0.98 | 0.31 | Yes | Yes |
| E506I | 0.47 | 0.09 | 0.45 | 0.09 | 0.69 | 0.13 | Yes | Yes |
| E506L | 0.30 | 0.04 | 0.61 | 0.04 | 0.56 | 0.07 | Yes | Yes |
| E506K | 0.18 | 0.06 | 0.59 | 0.05 | 1.08 | 0.08 | Yes | Yes |
| E506M | 0.53 | 0.06 | 0.28 | 0.07 | 0.47 | 0.17 | Yes | Yes |
| E506S | 0.01 | 0.05 | 0.47 | 0.04 | 0.50 | 0.06 | Yes | Yes |
| E506T | 0.39 | 0.06 | 0.12 | 0.07 | 0.90 | 0.23 | Yes | Yes |
| E506Y | 0.16 | 0.09 | 0.29 | 0.09 | 0.43 | 0.25 | Yes | Yes |
| E506V | 0.45 | 0.03 | 0.51 | 0.03 | 0.75 | 0.05 | Yes | Yes |
| E506D | 0.19 | 0.04 | −0.30 | 0.05 | −0.08 | 0.08 | Yes | No |
| E506F | −0.21 | 0.10 | 0.47 | 0.08 | 0.20 | 0.25 | Yes | No |
| E506P | −0.07 | 0.08 | 0.37 | 0.07 | 0.52 | 0.26 | Yes | No |
| E506* | −0.79 | 0.08 | −0.79 | 0.08 | −1.11 | 0.07 | No | No |
| E506W | 0.43 | 0.04 | 0.10 | 0.04 | −0.07 | 0.05 | Yes | No |
| M507A | −0.47 | 0.06 | −0.34 | 0.06 | −0.32 | 0.19 | No | No |
| M507R | −0.42 | 0.02 | −0.58 | 0.03 | −0.64 | 0.04 | No | No |
| M507C | −0.41 | 0.09 | −0.31 | 0.09 | 0.15 | 0.28 | Yes | No |
| M507Q | −0.68 | 0.07 | −0.56 | 0.07 | −0.44 | 0.17 | No | No |
| M507E | NA | NA | NA | NA | −1.23 | 0.19 | Yes | No |
| M507G | −0.98 | 0.05 | −0.71 | 0.05 | −1.24 | 0.12 | No | No |
| M507H | −0.65 | 0.12 | 0.68 | 0.09 | −0.86 | 0.28 | Yes | No |
| M507I | −0.06 | 0.04 | −0.12 | 0.04 | 0.01 | 0.07 | Yes | No |
| M507L | −0.20 | 0.03 | −0.35 | 0.03 | −0.16 | 0.03 | No | No |
| M507K | −1.42 | 0.13 | −0.06 | 0.09 | −1.00 | 0.19 | No | No |
| M507F | 0.05 | 0.09 | −0.78 | 0.12 | −0.05 | 0.36 | Yes | No |
| M507P | −2.08 | 0.12 | −2.19 | 0.13 | −1.58 | 0.18 | No | No |
| M507S | −1.03 | 0.09 | −0.34 | 0.07 | −0.46 | 0.18 | No | No |
| M507* | −1.68 | 0.15 | −0.72 | 0.11 | NA | NA | Yes | No |
| M507T | −0.11 | 0.06 | −0.30 | 0.07 | −0.03 | 0.13 | No | No |
| M507W | −0.94 | 0.08 | −0.59 | 0.07 | −0.82 | 0.18 | No | No |
| M507V | −0.17 | 0.03 | 0.06 | 0.03 | −0.28 | 0.06 | Yes | No |
| E508A | 0.36 | 0.03 | 0.20 | 0.03 | 0.18 | 0.06 | Yes | Yes |
| E508R | 0.54 | 0.03 | 0.80 | 0.03 | 0.82 | 0.06 | Yes | Yes |
| E508Q | 0.25 | 0.06 | 0.11 | 0.07 | 0.51 | 0.13 | Yes | Yes |
| E508G | 0.16 | 0.02 | 0.17 | 0.02 | 0.22 | 0.04 | Yes | Yes |
| E508L | 0.03 | 0.04 | 0.10 | 0.04 | 0.26 | 0.11 | Yes | Yes |
| E508K | 0.20 | 0.06 | 0.49 | 0.06 | 0.66 | 0.08 | Yes | Yes |
| E508M | 0.25 | 0.07 | 0.57 | 0.06 | 0.54 | 0.11 | Yes | Yes |
| E508F | 0.27 | 0.08 | 0.19 | 0.08 | 0.39 | 0.29 | Yes | Yes |
| E508S | 0.31 | 0.05 | 0.62 | 0.04 | 0.34 | 0.06 | Yes | Yes |
| E508T | 0.19 | 0.06 | 0.73 | 0.06 | 0.55 | 0.10 | Yes | Yes |
| E508Y | 0.35 | 0.09 | 0.19 | 0.10 | 0.21 | 0.27 | Yes | Yes |
| E508V | 0.16 | 0.03 | 0.22 | 0.03 | 0.34 | 0.05 | Yes | Yes |
| E508N | −0.08 | 0.11 | −0.10 | 0.11 | 0.55 | 0.20 | Yes | No |
| E508D | 0.09 | 0.04 | −0.15 | 0.04 | −0.16 | 0.06 | Yes | No |
| E508C | −0.15 | 0.08 | 0.18 | 0.07 | 0.02 | 0.24 | Yes | No |
| E508H | −0.25 | 0.11 | 0.57 | 0.09 | 0.65 | 0.24 | Yes | No |
| E508I | 0.29 | 0.09 | −0.12 | 0.10 | 0.54 | 0.15 | Yes | No |
| E508P | −0.52 | 0.08 | −0.67 | 0.08 | −0.63 | 0.20 | No | No |
| E508* | −0.63 | 0.06 | −0.82 | 0.07 | −0.79 | 0.09 | No | No |
| E508W | −0.29 | 0.05 | 0.45 | 0.05 | 0.07 | 0.09 | Yes | No |
| P509R | 0.23 | 0.03 | 0.27 | 0.03 | 1.04 | 0.05 | Yes | Yes |
| P509K | 0.01 | 0.07 | 0.12 | 0.07 | 1.29 | 0.13 | Yes | Yes |
| P509M | 0.34 | 0.07 | 0.34 | 0.07 | 0.10 | 0.22 | Yes | Yes |
| P509S | 0.10 | 0.04 | 0.14 | 0.04 | 0.14 | 0.10 | Yes | Yes |
| P509W | 0.04 | 0.05 | 0.33 | 0.05 | 0.61 | 0.18 | Yes | Yes |
| P509Y | 0.18 | 0.09 | 0.20 | 0.09 | 0.53 | 0.30 | Yes | Yes |
| P509A | 0.45 | 0.04 | −0.19 | 0.04 | −0.04 | 0.05 | Yes | No |
| P509N | 0.18 | 0.09 | −0.33 | 0.11 | 0.63 | 0.29 | Yes | No |
| P509D | −0.12 | 0.08 | −0.12 | 0.08 | −0.01 | 0.21 | No | No |
| P509C | 0.00 | 0.06 | −0.37 | 0.07 | 0.05 | 0.20 | Yes | No |
| P509Q | 0.08 | 0.05 | −0.10 | 0.06 | 0.36 | 0.08 | Yes | No |
| P509E | −0.27 | 0.06 | 0.33 | 0.05 | 0.38 | 0.17 | Yes | No |
| P509G | −0.06 | 0.03 | 0.19 | 0.03 | 0.00 | 0.05 | Yes | No |
| P509H | 0.09 | 0.03 | −0.31 | 0.03 | −0.19 | 0.05 | Yes | No |
| P509I | −0.10 | 0.09 | −0.34 | 0.10 | −0.56 | 0.28 | No | No |
| P509L | 0.11 | 0.04 | 0.17 | 0.04 | −0.17 | 0.05 | Yes | No |
| P509F | −0.12 | 0.09 | 0.24 | 0.08 | 0.52 | 0.11 | Yes | No |
| P509* | −2.22 | 0.15 | −0.93 | 0.09 | NA | NA | Yes | No |
| P509T | 0.10 | 0.06 | 0.58 | 0.05 | −0.04 | 0.11 | Yes | No |
| P509V | 0.09 | 0.04 | 0.07 | 0.04 | −0.45 | 0.08 | Yes | No |
| S510G | 0.18 | 0.03 | 0.49 | 0.03 | 0.21 | 0.06 | Yes | Yes |
| S510L | 0.57 | 0.06 | 0.72 | 0.06 | 0.74 | 0.09 | Yes | Yes |
| S510A | 0.29 | 0.06 | −0.25 | 0.07 | 0.04 | 0.22 | Yes | No |
| S510R | −0.38 | 0.03 | −0.43 | 0.03 | −0.53 | 0.04 | No | No |
| S510N | −0.36 | 0.09 | −0.11 | 0.09 | 0.06 | 0.17 | Yes | No |
| S510D | −1.40 | 0.15 | −1.36 | 0.15 | NA | NA | Yes | No |
| S510C | −0.14 | 0.06 | 0.03 | 0.06 | 0.28 | 0.14 | Yes | No |
| S510E | −0.71 | 0.09 | −1.10 | 0.11 | −1.07 | 0.25 | No | No |
| S510I | 0.02 | 0.05 | −0.39 | 0.06 | −0.76 | 0.03 | Yes | No |
| S510M | −1.15 | 0.14 | −0.15 | 0.10 | 0.36 | 0.23 | Yes | No |
| S510F | −0.15 | 0.12 | 0.48 | 0.11 | NA | NA | Yes | No |
| S510* | −1.11 | 0.13 | −1.36 | 0.15 | NA | NA | Yes | No |
| S510T | 0.18 | 0.08 | 0.64 | 0.08 | −0.17 | 0.16 | Yes | No |
| S510W | −0.06 | 0.06 | −0.94 | 0.08 | −0.37 | 0.17 | No | No |
| S510V | −0.05 | 0.05 | 0.44 | 0.05 | 0.44 | 0.18 | Yes | No |
| L511A | 0.07 | 0.10 | −0.06 | 0.11 | −0.31 | 0.15 | Yes | No |
| L511R | 0.00 | 0.03 | −0.21 | 0.04 | 0.09 | 0.06 | Yes | No |
| L511Q | −0.72 | 0.15 | 0.45 | 0.11 | NA | NA | Yes | No |
| L511E | −0.31 | 0.12 | −0.25 | 0.13 | −0.81 | 0.34 | No | No |
| L511G | −0.42 | 0.07 | 0.08 | 0.06 | −0.02 | 0.27 | Yes | No |
| L511K | 0.26 | 0.13 | 0.44 | 0.12 | NA | NA | Yes | No |
| L511M | −0.67 | 0.11 | 0.33 | 0.08 | 0.25 | 0.20 | Yes | No |
| L511P | 0.04 | 0.08 | 0.00 | 0.09 | 0.26 | 0.13 | Yes | No |
| L511S | −0.12 | 0.12 | −0.37 | 0.13 | 0.02 | 0.33 | Yes | No |
| L511W | 0.61 | 0.08 | 0.02 | 0.09 | −0.40 | 0.38 | Yes | No |
| L511V | −0.26 | 0.06 | 0.38 | 0.06 | −0.02 | 0.16 | Yes | No |
| S512R | 0.07 | 0.07 | 0.34 | 0.07 | 0.07 | 0.19 | Yes | Yes |
| S512A | 0.11 | 0.05 | −0.15 | 0.06 | −0.16 | 0.06 | Yes | No |
| S512N | −0.12 | 0.19 | 0.58 | 0.16 | NA | NA | Yes | No |
| S512D | −0.14 | 0.12 | −0.33 | 0.13 | 0.47 | 0.39 | Yes | No |
| S512C | 0.06 | 0.08 | 0.61 | 0.08 | −0.18 | 0.19 | Yes | No |
| S512E | 0.44 | 0.10 | −0.11 | 0.12 | 0.21 | 0.36 | Yes | No |
| S512G | −0.15 | 0.05 | −0.15 | 0.05 | 0.10 | 0.12 | Yes | No |
| S512L | −0.16 | 0.10 | 0.53 | 0.09 | −0.21 | 0.20 | Yes | No |
| S512K | 0.65 | 0.15 | 0.57 | 0.15 | NA | NA | Yes | No |
| S512M | 0.28 | 0.14 | 0.24 | 0.15 | NA | NA | Yes | No |
| S512F | −0.28 | 0.08 | −0.16 | 0.08 | −0.32 | 0.13 | No | No |
| S512P | −0.22 | 0.08 | −0.09 | 0.08 | −0.16 | 0.13 | No | No |
| S512T | −0.17 | 0.09 | 0.05 | 0.08 | −0.07 | 0.15 | Yes | No |
| S512W | −0.13 | 0.10 | 0.13 | 0.10 | NA | NA | Yes | No |
| S512Y | −0.26 | 0.13 | −0.68 | 0.15 | NA | NA | Yes | No |
| S512V | −0.38 | 0.08 | −0.54 | 0.09 | −0.64 | 0.19 | No | No |
| F513L | 0.53 | 0.04 | 0.63 | 0.04 | 0.41 | 0.07 | Yes | Yes |
| F513W | 0.04 | 0.06 | 0.35 | 0.06 | 0.28 | 0.13 | Yes | Yes |
| F513A | −1.58 | 0.11 | 0.20 | 0.06 | −0.49 | 0.25 | Yes | No |
| F513R | −1.56 | 0.09 | −1.47 | 0.09 | −0.89 | 0.06 | No | No |
| F513D | −1.02 | 0.15 | 0.12 | 0.11 | NA | NA | Yes | No |
| F513C | −0.83 | 0.10 | −0.27 | 0.09 | −0.27 | 0.14 | No | No |
| F513Q | 0.00 | 0.13 | 0.58 | 0.12 | NA | NA | Yes | No |
| F513E | −0.37 | 0.09 | 0.33 | 0.08 | −0.38 | 0.38 | Yes | No |
| F513G | −1.33 | 0.06 | −0.80 | 0.05 | −1.00 | 0.13 | No | No |
| F513I | 0.78 | 0.10 | 0.21 | 0.11 | NA | NA | Yes | No |
| F513M | −0.36 | 0.12 | 0.73 | 0.10 | 0.49 | 0.23 | Yes | No |
| F513S | −0.59 | 0.07 | −0.47 | 0.07 | −0.61 | 0.10 | No | No |
| F513T | NA | NA | NA | NA | −0.35 | 0.19 | Yes | No |
| F513Y | −0.10 | 0.10 | 0.26 | 0.09 | 0.44 | 0.12 | Yes | No |
| F513V | −0.53 | 0.06 | −0.27 | 0.06 | 0.06 | 0.19 | Yes | No |
| Y514A | −0.28 | 0.05 | −0.43 | 0.05 | −0.73 | 0.13 | No | No |
| Y514R | −0.23 | 0.04 | −0.47 | 0.05 | −0.86 | 0.14 | No | No |
| Y514N | −0.17 | 0.09 | 0.07 | 0.08 | −0.53 | 0.17 | Yes | No |
| Y514D | −1.11 | 0.10 | −1.20 | 0.11 | −1.22 | 0.16 | No | No |
| Y514C | −0.39 | 0.05 | −0.35 | 0.05 | −0.55 | 0.09 | No | No |
| Y514Q | −1.35 | 0.13 | −0.62 | 0.10 | −1.01 | 0.29 | No | No |
| Y514E | −1.08 | 0.08 | −0.93 | 0.08 | −1.50 | 0.19 | No | No |
| Y514G | −0.76 | 0.04 | −0.49 | 0.04 | −1.06 | 0.11 | No | No |
| Y514H | 0.39 | 0.06 | 0.29 | 0.06 | −0.31 | 0.12 | Yes | No |
| Y514I | −0.14 | 0.09 | −0.84 | 0.11 | NA | NA | Yes | No |
| Y514L | −0.37 | 0.05 | −0.57 | 0.05 | −0.73 | 0.10 | No | No |
| Y514K | −0.52 | 0.09 | −1.28 | 0.12 | NA | NA | Yes | No |
| Y514M | −0.50 | 0.07 | −0.38 | 0.07 | −0.59 | 0.19 | No | No |
| Y514F | −0.29 | 0.07 | 0.14 | 0.06 | −0.35 | 0.11 | Yes | No |
| Y514S | −0.33 | 0.05 | −0.32 | 0.05 | −0.86 | 0.11 | No | No |
| Y514* | −0.91 | 0.08 | −1.20 | 0.10 | −1.18 | 0.13 | No | No |
| Y514T | −1.01 | 0.09 | −1.31 | 0.10 | −0.98 | 0.18 | No | No |
| Y514W | 0.17 | 0.05 | 0.46 | 0.05 | −0.09 | 0.23 | Yes | No |
| Y514V | −0.45 | 0.04 | −0.41 | 0.04 | −0.92 | 0.06 | No | No |
| N515A | 0.60 | 0.06 | 0.82 | 0.06 | 0.12 | 0.11 | Yes | Yes |
| N515R | 0.63 | 0.06 | 0.82 | 0.05 | 0.19 | 0.11 | Yes | Yes |
| N515I | 0.23 | 0.07 | 0.30 | 0.07 | 0.16 | 0.14 | Yes | Yes |
| N515L | 0.33 | 0.06 | 0.53 | 0.06 | 0.07 | 0.20 | Yes | Yes |
| N515T | 0.41 | 0.08 | 0.14 | 0.08 | 0.29 | 0.16 | Yes | Yes |
| N515V | 0.50 | 0.05 | 0.49 | 0.05 | 0.45 | 0.09 | Yes | Yes |
| N515D | 0.05 | 0.06 | −0.17 | 0.06 | −0.30 | 0.10 | Yes | No |
| N515C | 0.59 | 0.12 | 0.62 | 0.12 | −0.02 | 0.30 | Yes | No |
| N515Q | 0.46 | 0.11 | 0.69 | 0.11 | NA | NA | Yes | No |
| N515E | 0.47 | 0.07 | 0.56 | 0.07 | −0.14 | 0.19 | Yes | No |
| N515G | −0.10 | 0.05 | 0.37 | 0.04 | −0.13 | 0.07 | Yes | No |
| N515H | 0.09 | 0.10 | −0.59 | 0.13 | −0.25 | 0.21 | Yes | No |
| N515K | 0.07 | 0.08 | 0.16 | 0.08 | −0.13 | 0.16 | Yes | No |
| N515M | 0.73 | 0.09 | 0.45 | 0.10 | −0.01 | 0.12 | Yes | No |
| N515F | 0.49 | 0.12 | 0.48 | 0.12 | NA | NA | Yes | No |
| N515P | −1.10 | 0.16 | −0.13 | 0.12 | −0.32 | 0.38 | No | No |
| N515S | 0.08 | 0.05 | −0.15 | 0.05 | 0.19 | 0.08 | Yes | No |
| N515W | 0.79 | 0.08 | 0.42 | 0.09 | −0.60 | 0.31 | Yes | No |
| N515Y | −0.30 | 0.12 | −0.55 | 0.13 | 0.03 | 0.22 | Yes | No |
| K516R | 0.01 | 0.03 | 0.26 | 0.03 | 0.40 | 0.06 | Yes | Yes |
| K516A | 0.25 | 0.05 | 0.13 | 0.06 | −0.33 | 0.21 | Yes | No |
| K516N | 0.37 | 0.09 | 0.01 | 0.11 | −0.01 | 0.16 | Yes | No |
| K516D | NA | NA | NA | NA | −0.48 | 0.31 | Yes | No |
| K516C | −1.37 | 0.13 | 0.14 | 0.08 | −0.36 | 0.16 | Yes | No |
| K516Q | 0.08 | 0.07 | −0.76 | 0.10 | −0.08 | 0.16 | Yes | No |
| K516E | −0.23 | 0.04 | −0.32 | 0.05 | −0.33 | 0.09 | No | No |
| K516G | −0.34 | 0.03 | −0.01 | 0.03 | −0.34 | 0.05 | No | No |
| K516I | −0.29 | 0.14 | −0.03 | 0.14 | NA | NA | Yes | No |
| K516L | −0.29 | 0.06 | −0.06 | 0.06 | −0.56 | 0.18 | No | No |
| K516M | −0.29 | 0.08 | −0.21 | 0.08 | −0.31 | 0.17 | No | No |
| K516P | −0.37 | 0.10 | −0.96 | 0.12 | NA | NA | Yes | No |
| K516S | −0.34 | 0.06 | 0.23 | 0.06 | −0.22 | 0.21 | Yes | No |
| K516* | −0.66 | 0.09 | −0.86 | 0.10 | −1.08 | 0.19 | No | No |
| K516T | −0.18 | 0.04 | −0.43 | 0.04 | −0.09 | 0.06 | No | No |
| K516W | −0.42 | 0.06 | −0.55 | 0.07 | −1.18 | 0.16 | No | No |
| K516V | −0.47 | 0.05 | −0.20 | 0.05 | −1.04 | 0.11 | No | No |
| A517R | −2.02 | 0.07 | −1.56 | 0.06 | −1.46 | 0.07 | No | No |
| A517D | −1.35 | 0.11 | −0.85 | 0.09 | −1.19 | 0.18 | No | No |
| A517C | −0.35 | 0.08 | 0.68 | 0.07 | 0.14 | 0.17 | Yes | No |
| A517E | −1.34 | 0.09 | −1.16 | 0.09 | −1.86 | 0.16 | No | No |
| A517G | −0.69 | 0.03 | −0.65 | 0.03 | −0.77 | 0.04 | No | No |
| A517I | 0.77 | 0.10 | −0.42 | 0.13 | NA | NA | Yes | No |
| A517L | −0.30 | 0.06 | −0.44 | 0.06 | −1.22 | 0.17 | No | No |
| A517M | −0.50 | 0.10 | −0.24 | 0.10 | −0.57 | 0.30 | No | No |
| A517F | −0.50 | 0.12 | −0.90 | 0.14 | NA | NA | Yes | No |
| A517P | −0.75 | 0.08 | −1.06 | 0.09 | −0.86 | 0.12 | No | No |
| A517S | −0.28 | 0.05 | −0.24 | 0.05 | −0.65 | 0.14 | No | No |
| A517T | −0.34 | 0.06 | 0.06 | 0.06 | −0.42 | 0.11 | Yes | No |
| A517W | −1.22 | 0.07 | −0.27 | 0.05 | −1.43 | 0.16 | No | No |
| A517Y | 0.02 | 0.13 | 0.04 | 0.13 | NA | NA | Yes | No |
| A517V | −0.33 | 0.04 | −0.14 | 0.04 | −0.44 | 0.07 | No | No |
| R518K | 0.20 | 0.09 | 0.72 | 0.08 | 0.05 | 0.17 | Yes | Yes |
| R518A | −0.12 | 0.07 | −0.28 | 0.07 | −0.87 | 0.24 | No | No |
| R518C | −1.13 | 0.12 | −0.21 | 0.09 | NA | NA | Yes | No |
| R518E | −0.72 | 0.10 | −1.08 | 0.12 | NA | NA | Yes | No |
| R518G | −1.34 | 0.05 | −0.78 | 0.04 | −0.87 | 0.08 | No | No |
| R518L | −1.49 | 0.12 | −1.84 | 0.15 | NA | NA | Yes | No |
| R518F | −0.96 | 0.16 | 0.45 | 0.11 | NA | NA | Yes | No |
| R518S | −0.74 | 0.08 | −1.20 | 0.09 | −0.73 | 0.12 | No | No |
| R518* | −0.33 | 0.08 | −0.34 | 0.08 | −0.69 | 0.13 | No | No |
| R518T | −0.50 | 0.10 | −0.37 | 0.10 | −0.40 | 0.15 | No | No |
| R518W | −1.01 | 0.09 | −1.13 | 0.10 | −1.22 | 0.19 | No | No |
| R518V | −0.44 | 0.06 | −1.39 | 0.09 | −1.43 | 0.09 | No | No |
| N519A | 0.64 | 0.06 | 1.07 | 0.06 | −0.06 | 0.25 | Yes | No |
| N519R | 0.47 | 0.05 | 0.46 | 0.05 | −0.02 | 0.08 | Yes | No |
| N519D | 0.10 | 0.05 | −0.13 | 0.05 | −0.29 | 0.07 | Yes | No |
| N519C | 0.21 | 0.11 | 0.23 | 0.11 | NA | NA | Yes | No |
| N519Q | 0.14 | 0.12 | 0.71 | 0.11 | NA | NA | Yes | No |
| N519E | −0.66 | 0.10 | −0.38 | 0.09 | −0.89 | 0.23 | No | No |
| N519G | 0.21 | 0.04 | 0.10 | 0.04 | −0.54 | 0.08 | Yes | No |
| N519H | 0.10 | 0.09 | −0.67 | 0.11 | NA | NA | Yes | No |
| N519I | 0.29 | 0.09 | 0.18 | 0.09 | −0.02 | 0.15 | Yes | No |
| N519L | 0.28 | 0.06 | 0.47 | 0.06 | −0.37 | 0.08 | Yes | No |
| N519K | −0.17 | 0.09 | −0.35 | 0.10 | −0.46 | 0.19 | No | No |
| N519M | −0.19 | 0.10 | 0.36 | 0.09 | −0.05 | 0.13 | Yes | No |
| N519F | 0.38 | 0.14 | 0.21 | 0.15 | NA | NA | Yes | No |
| N519P | −0.72 | 0.13 | −0.23 | 0.11 | NA | NA | Yes | No |
| N519S | 0.08 | 0.05 | −0.03 | 0.05 | 0.02 | 0.12 | Yes | No |
| N519T | 0.24 | 0.08 | 0.01 | 0.09 | −0.37 | 0.16 | Yes | No |
| N519W | −0.02 | 0.08 | 0.38 | 0.08 | −0.12 | 0.31 | Yes | No |
| N519Y | 0.10 | 0.12 | 0.65 | 0.11 | −0.09 | 0.22 | Yes | No |
| N519V | 0.12 | 0.05 | 0.14 | 0.05 | −0.39 | 0.06 | Yes | No |
| Y520A | −1.19 | 0.12 | −0.30 | 0.09 | NA | NA | Yes | No |
| Y520R | −0.37 | 0.08 | −1.30 | 0.11 | −1.04 | 0.24 | No | No |
| Y520N | −0.05 | 0.09 | −0.45 | 0.10 | −0.62 | 0.14 | No | No |
| Y520D | −0.50 | 0.12 | −0.04 | 0.10 | NA | NA | Yes | No |
| Y520C | −0.23 | 0.07 | −0.24 | 0.07 | −0.52 | 0.12 | No | No |
| Y520E | −0.61 | 0.13 | −0.85 | 0.15 | NA | NA | Yes | No |
| Y520G | −1.91 | 0.10 | −1.08 | 0.08 | −1.47 | 0.09 | No | No |
| Y520H | 0.12 | 0.07 | −0.14 | 0.07 | −0.34 | 0.10 | Yes | No |
| Y520F | 0.19 | 0.13 | −0.21 | 0.15 | NA | NA | Yes | No |
| Y520S | −0.73 | 0.11 | −0.66 | 0.11 | −1.13 | 0.18 | No | No |
| Y520* | −0.19 | 0.07 | −0.42 | 0.08 | −0.48 | 0.15 | No | No |
| Y520W | −0.38 | 0.10 | 0.06 | 0.09 | −0.03 | 0.16 | Yes | No |
| Y520V | −1.45 | 0.13 | −1.16 | 0.12 | NA | NA | Yes | No |
| A521D | −0.72 | 0.13 | −0.50 | 0.13 | NA | NA | Yes | No |
| A521C | 0.90 | 0.16 | 1.29 | 0.16 | NA | NA | Yes | No |
| A521G | −0.52 | 0.05 | −0.73 | 0.06 | −0.98 | 0.12 | No | No |
| A521L | −0.61 | 0.10 | −0.13 | 0.09 | −0.98 | 0.12 | No | No |
| A521P | −0.19 | 0.11 | −0.78 | 0.14 | NA | NA | Yes | No |
| A521S | 0.00 | 0.09 | 0.04 | 0.10 | −0.51 | 0.27 | Yes | No |
| A521T | −0.23 | 0.07 | 0.10 | 0.06 | −0.33 | 0.11 | Yes | No |
| A521V | −0.40 | 0.06 | −0.88 | 0.07 | −0.60 | 0.13 | No | No |
| T522L | 1.10 | 0.05 | 0.92 | 0.05 | 0.28 | 0.10 | Yes | Yes |
| T522M | 0.92 | 0.07 | 0.81 | 0.08 | 0.53 | 0.21 | Yes | Yes |
| T522V | 0.16 | 0.05 | 0.28 | 0.05 | 0.04 | 0.07 | Yes | Yes |
| T522A | −0.01 | 0.05 | −0.37 | 0.06 | −0.55 | 0.08 | No | No |
| T522R | −0.17 | 0.04 | 0.31 | 0.04 | −0.40 | 0.12 | Yes | No |
| T522N | 0.11 | 0.07 | −1.14 | 0.11 | −0.50 | 0.13 | Yes | No |
| T522C | 0.09 | 0.08 | 0.38 | 0.08 | −0.41 | 0.38 | Yes | No |
| T522Q | 0.71 | 0.09 | 0.47 | 0.10 | −0.51 | 0.36 | Yes | No |
| T522E | −0.22 | 0.08 | −1.54 | 0.13 | −0.72 | 0.27 | No | No |
| T522G | −0.37 | 0.04 | −0.18 | 0.04 | −0.85 | 0.08 | No | No |
| T522I | 0.23 | 0.07 | −0.06 | 0.08 | −0.11 | 0.17 | Yes | No |
| T522K | −0.16 | 0.11 | −0.23 | 0.11 | −0.67 | 0.26 | No | No |
| T522F | 0.08 | 0.13 | 0.34 | 0.12 | NA | NA | Yes | No |
| T522P | −1.16 | 0.11 | −1.52 | 0.14 | −1.14 | 0.16 | No | No |
| T522S | 0.23 | 0.05 | −0.20 | 0.05 | −0.38 | 0.10 | Yes | No |
| T522W | −0.26 | 0.07 | −0.35 | 0.07 | −0.90 | 0.13 | No | No |
| K523R | 0.17 | 0.02 | 0.37 | 0.02 | 0.00 | 0.03 | Yes | Yes |
| K523A | −0.19 | 0.03 | 0.15 | 0.03 | −0.48 | 0.09 | Yes | No |
| K523N | −0.31 | 0.07 | −0.48 | 0.07 | −1.00 | 0.08 | No | No |
| K523D | −1.14 | 0.07 | −1.35 | 0.08 | −1.21 | 0.09 | No | No |
| K523C | −0.22 | 0.05 | 0.07 | 0.04 | −0.81 | 0.12 | Yes | No |
| K523Q | −0.12 | 0.04 | −0.22 | 0.04 | 0.01 | 0.06 | Yes | No |
| K523E | −0.57 | 0.04 | −0.56 | 0.04 | −0.86 | 0.06 | No | No |
| K523G | −0.16 | 0.02 | 0.09 | 0.02 | −0.56 | 0.03 | Yes | No |
| K523H | −1.08 | 0.11 | −0.05 | 0.08 | −1.04 | 0.28 | No | No |
| K523I | −0.20 | 0.07 | 0.41 | 0.06 | −1.23 | 0.21 | Yes | No |
| K523L | −0.78 | 0.04 | −0.30 | 0.03 | −0.70 | 0.07 | No | No |
| K523M | −0.19 | 0.04 | −0.18 | 0.04 | −0.52 | 0.06 | No | No |
| K523F | −1.08 | 0.08 | −0.93 | 0.08 | −1.27 | 0.09 | No | No |
| K523P | −1.41 | 0.08 | −0.39 | 0.06 | −1.21 | 0.15 | No | No |
| K523S | 0.13 | 0.03 | 0.10 | 0.03 | −0.36 | 0.07 | Yes | No |
| K523* | −1.40 | 0.07 | −1.46 | 0.08 | −1.19 | 0.12 | No | No |
| K523T | −0.19 | 0.04 | −0.19 | 0.04 | −0.49 | 0.08 | No | No |
| K523W | −0.97 | 0.04 | −0.87 | 0.04 | −1.41 | 0.09 | No | No |
| K523Y | −1.25 | 0.10 | −0.43 | 0.08 | −1.36 | 0.19 | No | No |
| K523V | −0.57 | 0.03 | −0.57 | 0.03 | −1.12 | 0.08 | No | No |
| K524A | −0.88 | 0.09 | −0.32 | 0.08 | −0.50 | 0.24 | No | No |
| K524R | −0.32 | 0.04 | 0.15 | 0.04 | −0.28 | 0.09 | Yes | No |
| K524N | 0.04 | 0.04 | −0.48 | 0.05 | −0.19 | 0.09 | Yes | No |
| K524C | 0.06 | 0.10 | 0.03 | 0.10 | NA | NA | Yes | No |
| K524Q | −0.42 | 0.09 | −0.54 | 0.10 | −0.47 | 0.14 | No | No |
| K524E | −0.53 | 0.06 | −0.11 | 0.06 | −0.49 | 0.10 | No | No |
| K524G | −0.43 | 0.04 | −0.19 | 0.04 | −0.80 | 0.06 | No | No |
| K524L | −0.25 | 0.07 | 0.32 | 0.06 | −0.81 | 0.21 | Yes | No |
| K524M | −1.28 | 0.15 | −0.75 | 0.13 | −0.69 | 0.15 | No | No |
| K524P | −0.70 | 0.12 | −0.10 | 0.10 | 0.02 | 0.29 | Yes | No |
| K524S | −0.67 | 0.08 | −0.04 | 0.07 | −0.73 | 0.12 | No | No |
| K524* | −0.92 | 0.11 | −0.75 | 0.11 | −0.76 | 0.13 | No | No |
| K524T | −0.10 | 0.04 | −0.26 | 0.04 | −0.15 | 0.06 | No | No |
| K524W | −0.58 | 0.08 | −1.54 | 0.12 | −1.19 | 0.22 | No | No |
| K524V | −0.71 | 0.07 | −0.01 | 0.06 | −0.68 | 0.22 | No | No |
| P525A | −0.21 | 0.03 | 0.06 | 0.03 | −0.29 | 0.07 | Yes | No |
| P525R | −0.30 | 0.02 | −0.10 | 0.02 | −0.62 | 0.05 | No | No |
| P525N | −0.38 | 0.09 | −0.35 | 0.10 | −0.10 | 0.19 | No | No |
| P525D | 0.42 | 0.05 | −0.02 | 0.05 | −0.30 | 0.08 | Yes | No |
| P525C | −0.28 | 0.05 | −0.12 | 0.05 | −0.48 | 0.14 | No | No |
| P525Q | −0.21 | 0.06 | −0.19 | 0.06 | −0.35 | 0.13 | No | No |
| P525E | −0.22 | 0.04 | 0.24 | 0.04 | −0.30 | 0.05 | Yes | No |
| P525G | −0.24 | 0.02 | −0.17 | 0.02 | −0.51 | 0.05 | No | No |
| P525H | 0.17 | 0.06 | 0.18 | 0.07 | −0.24 | 0.12 | Yes | No |
| P525I | −0.48 | 0.09 | 0.06 | 0.08 | 0.19 | 0.22 | Yes | No |
| P525L | −0.37 | 0.03 | 0.25 | 0.03 | −0.61 | 0.06 | Yes | No |
| P525K | −0.90 | 0.08 | −1.00 | 0.09 | −0.57 | 0.17 | No | No |
| P525M | −0.55 | 0.06 | −0.18 | 0.06 | −0.54 | 0.13 | No | No |
| P525F | −0.17 | 0.07 | −0.61 | 0.08 | −0.70 | 0.16 | No | No |
| P525S | −0.06 | 0.03 | 0.04 | 0.03 | −0.42 | 0.08 | Yes | No |
| P525* | −1.61 | 0.09 | −1.54 | 0.09 | −1.56 | 0.08 | No | No |
| P525T | −0.25 | 0.05 | −0.31 | 0.05 | −0.45 | 0.11 | No | No |
| P525W | −0.25 | 0.04 | −0.04 | 0.03 | −0.59 | 0.11 | No | No |
| P525Y | −1.08 | 0.10 | −1.08 | 0.10 | −0.77 | 0.08 | No | No |
| P525V | −0.31 | 0.03 | −0.08 | 0.03 | −0.39 | 0.08 | No | No |
| Y526A | −0.28 | 0.07 | 0.17 | 0.06 | −0.89 | 0.19 | Yes | No |
| Y526R | −0.71 | 0.07 | −0.17 | 0.06 | −1.09 | 0.19 | No | No |
| Y526N | −0.64 | 0.11 | −0.15 | 0.09 | −0.25 | 0.17 | No | No |
| Y526D | −0.44 | 0.09 | 0.07 | 0.08 | −0.69 | 0.15 | Yes | No |
| Y526C | 0.04 | 0.06 | −0.03 | 0.06 | −0.26 | 0.12 | Yes | No |
| Y526Q | −0.10 | 0.11 | −0.64 | 0.13 | NA | NA | Yes | No |
| Y526E | −0.46 | 0.08 | −0.87 | 0.10 | −0.84 | 0.21 | No | No |
| Y526G | −0.22 | 0.05 | −0.17 | 0.05 | −0.65 | 0.16 | No | No |
| Y526H | −0.32 | 0.08 | −0.25 | 0.08 | −0.19 | 0.12 | No | No |
| Y526I | −0.40 | 0.13 | −0.52 | 0.14 | NA | NA | Yes | No |
| Y526L | −0.53 | 0.06 | −0.18 | 0.05 | −0.73 | 0.12 | No | No |
| Y526M | −0.47 | 0.10 | −0.40 | 0.10 | −1.12 | 0.27 | No | No |
| Y526F | −0.02 | 0.07 | −0.01 | 0.07 | −0.44 | 0.13 | No | No |
| Y526P | −0.19 | 0.10 | −0.88 | 0.13 | NA | NA | Yes | No |
| Y526S | −0.57 | 0.06 | −0.68 | 0.07 | −0.68 | 0.12 | No | No |
| Y526* | −0.42 | 0.05 | −0.44 | 0.06 | −0.61 | 0.09 | No | No |
| Y526T | −0.01 | 0.09 | −0.22 | 0.10 | −0.69 | 0.21 | No | No |
| Y526W | −1.02 | 0.10 | −0.19 | 0.08 | −0.32 | 0.13 | No | No |
| Y526V | −0.61 | 0.05 | −0.14 | 0.05 | −0.86 | 0.14 | No | No |
| S527D | 0.13 | 0.11 | 0.01 | 0.11 | 0.34 | 0.41 | Yes | Yes |
| S527A | 0.00 | 0.06 | −0.37 | 0.07 | −0.07 | 0.20 | Yes | No |
| S527R | −0.14 | 0.04 | −0.73 | 0.05 | −0.70 | 0.07 | No | No |
| S527N | −0.10 | 0.10 | −0.43 | 0.11 | 0.01 | 0.19 | Yes | No |
| S527C | −0.21 | 0.09 | −0.35 | 0.09 | −0.10 | 0.22 | No | No |
| S527Q | 0.09 | 0.12 | −0.39 | 0.14 | NA | NA | Yes | No |
| S527E | −0.49 | 0.10 | 0.57 | 0.08 | 0.03 | 0.16 | Yes | No |
| S527G | −0.43 | 0.04 | −0.21 | 0.04 | −0.53 | 0.09 | No | No |
| S527H | 0.47 | 0.15 | 0.10 | 0.17 | NA | NA | Yes | No |
| S527I | −1.06 | 0.16 | −0.43 | 0.14 | NA | NA | Yes | No |
| S527L | −0.12 | 0.07 | −0.24 | 0.07 | −0.44 | 0.27 | No | No |
| S527K | −0.09 | 0.11 | −0.57 | 0.13 | NA | NA | Yes | No |
| S527P | 0.07 | 0.10 | −0.33 | 0.11 | −0.47 | 0.36 | Yes | No |
| S527T | 0.01 | 0.09 | −0.30 | 0.10 | −0.22 | 0.18 | Yes | No |
| S527W | 0.03 | 0.07 | 0.15 | 0.07 | −0.50 | 0.23 | Yes | No |
| S527Y | 0.31 | 0.17 | 0.05 | 0.18 | NA | NA | Yes | No |
| S527V | −0.54 | 0.07 | −0.52 | 0.07 | −0.52 | 0.10 | No | No |
| V528D | 0.01 | 0.07 | 0.27 | 0.07 | 0.12 | 0.12 | Yes | Yes |
| V528L | 0.55 | 0.03 | 0.59 | 0.03 | 0.31 | 0.07 | Yes | Yes |
| V528M | 0.19 | 0.05 | 0.02 | 0.05 | 0.13 | 0.10 | Yes | Yes |
| V528A | −0.09 | 0.04 | 0.29 | 0.04 | −0.13 | 0.06 | Yes | No |
| V528R | −0.04 | 0.04 | 0.07 | 0.04 | −0.03 | 0.07 | Yes | No |
| V528N | 0.01 | 0.11 | −0.47 | 0.14 | 0.31 | 0.42 | Yes | No |
| V528C | 0.16 | 0.07 | 0.20 | 0.07 | −0.06 | 0.24 | Yes | No |
| V528Q | −0.44 | 0.09 | −0.29 | 0.09 | 0.07 | 0.11 | Yes | No |
| V528E | −0.66 | 0.06 | 0.16 | 0.05 | 0.00 | 0.11 | Yes | No |
| V528G | −0.14 | 0.02 | −0.19 | 0.02 | −0.19 | 0.03 | No | No |
| V528H | −0.62 | 0.15 | 1.01 | 0.11 | NA | NA | Yes | No |
| V528I | 0.16 | 0.08 | −0.09 | 0.09 | 0.07 | 0.11 | Yes | No |
| V528K | −0.14 | 0.08 | 0.36 | 0.08 | 0.13 | 0.14 | Yes | No |
| V528F | −0.10 | 0.09 | 0.39 | 0.08 | −0.59 | 0.21 | Yes | No |
| V528P | −0.10 | 0.08 | −0.66 | 0.10 | 0.10 | 0.11 | Yes | No |
| V528S | −0.12 | 0.05 | 0.26 | 0.05 | 0.11 | 0.06 | Yes | No |
| V528* | −1.66 | 0.13 | −1.20 | 0.12 | NA | NA | Yes | No |
| V528T | 0.29 | 0.07 | 0.00 | 0.07 | 0.18 | 0.17 | Yes | No |
| V528W | −1.31 | 0.07 | −1.47 | 0.08 | −0.99 | 0.14 | No | No |
| V528Y | −0.77 | 0.13 | −0.50 | 0.12 | 0.24 | 0.12 | Yes | No |
| E529A | −0.38 | 0.08 | −0.18 | 0.08 | 0.04 | 0.15 | Yes | No |
| E529R | NA | NA | NA | NA | −0.70 | 0.34 | Yes | No |
| E529D | 0.02 | 0.07 | −0.61 | 0.08 | 0.10 | 0.15 | Yes | No |
| E529Q | −0.43 | 0.14 | −0.49 | 0.15 | NA | NA | Yes | No |
| E529G | −0.25 | 0.05 | −0.16 | 0.05 | −0.61 | 0.11 | No | No |
| E529L | −0.45 | 0.11 | −0.56 | 0.11 | NA | NA | Yes | No |
| E529K | 0.21 | 0.10 | −0.28 | 0.11 | −0.65 | 0.19 | Yes | No |
| E529P | 0.08 | 0.15 | −0.30 | 0.17 | NA | NA | Yes | No |
| E529S | −0.18 | 0.11 | −0.08 | 0.11 | −0.20 | 0.45 | No | No |
| E529* | −0.22 | 0.11 | −0.69 | 0.14 | −0.58 | 0.17 | No | No |
| E529W | −0.19 | 0.13 | −0.11 | 0.13 | NA | NA | Yes | No |
| E529V | −0.35 | 0.06 | 0.08 | 0.06 | −0.48 | 0.10 | Yes | No |
| K530A | −0.96 | 0.10 | −0.76 | 0.10 | −0.90 | 0.14 | No | No |
| K530R | −0.56 | 0.04 | −0.32 | 0.04 | −0.59 | 0.08 | No | No |
| K530N | −0.78 | 0.15 | −0.73 | 0.16 | NA | NA | Yes | No |
| K530C | −0.10 | 0.10 | −0.43 | 0.11 | NA | NA | Yes | No |
| K530Q | −0.22 | 0.05 | −0.56 | 0.05 | −0.60 | 0.10 | No | No |
| K530E | −0.48 | 0.05 | −0.35 | 0.05 | −0.85 | 0.09 | No | No |
| K530G | −1.18 | 0.07 | −1.09 | 0.07 | −1.15 | 0.14 | No | No |
| K530L | −1.74 | 0.09 | −1.04 | 0.07 | −1.40 | 0.14 | No | No |
| K530M | −0.72 | 0.07 | −0.42 | 0.07 | −0.83 | 0.13 | No | No |
| K530F | −1.17 | 0.15 | −0.40 | 0.12 | NA | NA | Yes | No |
| K530S | −1.15 | 0.09 | −0.65 | 0.08 | −1.15 | 0.13 | No | No |
| K530* | −0.63 | 0.07 | −0.43 | 0.07 | −0.68 | 0.09 | No | No |
| K530T | −0.51 | 0.07 | −0.72 | 0.07 | −0.68 | 0.10 | No | No |
| K530W | −1.73 | 0.12 | −0.35 | 0.08 | −1.35 | 0.20 | No | No |
| K530V | −0.98 | 0.08 | −1.46 | 0.10 | −1.55 | 0.23 | No | No |
| F531A | −1.39 | 0.13 | −1.72 | 0.15 | NA | NA | Yes | No |
| F531R | −1.90 | 0.12 | −1.41 | 0.10 | −1.75 | 0.23 | No | No |
| F531C | −0.40 | 0.05 | −0.81 | 0.06 | −0.85 | 0.09 | No | No |
| F531G | −1.68 | 0.08 | −1.22 | 0.07 | −1.58 | 0.14 | No | No |
| F531I | −0.43 | 0.09 | −0.86 | 0.11 | −0.62 | 0.11 | No | No |
| F531L | −0.35 | 0.05 | −0.40 | 0.05 | −0.55 | 0.07 | No | No |
| F531S | −0.56 | 0.07 | −0.79 | 0.08 | −0.98 | 0.11 | No | No |
| F531W | −1.68 | 0.13 | −0.86 | 0.10 | −0.27 | 0.21 | No | No |
| F531Y | −0.99 | 0.16 | −0.55 | 0.14 | NA | NA | Yes | No |
| F531V | −0.22 | 0.02 | −0.64 | 0.03 | −0.74 | 0.05 | No | No |
| K532A | NA | NA | NA | NA | −0.93 | 0.19 | Yes | No |
| K532R | −0.63 | 0.05 | −0.63 | 0.05 | −0.56 | 0.10 | No | No |
| K532N | −0.39 | 0.11 | −0.71 | 0.13 | −0.45 | 0.12 | No | No |
| K532Q | −0.42 | 0.08 | −0.74 | 0.10 | −0.96 | 0.11 | No | No |
| K532E | −0.49 | 0.05 | −0.38 | 0.05 | −0.64 | 0.12 | No | No |
| K532G | −1.74 | 0.08 | −1.15 | 0.07 | −1.35 | 0.11 | No | No |
| K532L | −1.28 | 0.11 | −1.26 | 0.11 | −1.36 | 0.21 | No | No |
| K532M | −0.48 | 0.09 | −0.58 | 0.10 | −0.65 | 0.09 | No | No |
| K532S | NA | NA | NA | NA | −0.93 | 0.25 | Yes | No |
| K532* | −0.42 | 0.06 | −0.27 | 0.06 | −0.65 | 0.12 | No | No |
| K532T | −0.37 | 0.06 | −1.05 | 0.07 | −0.52 | 0.10 | No | No |
| K532V | −1.99 | 0.11 | −1.32 | 0.09 | −1.19 | 0.12 | No | No |
| L533R | −0.17 | 0.04 | −0.41 | 0.04 | −0.57 | 0.08 | No | No |
| L533G | −1.82 | 0.14 | −1.54 | 0.13 | NA | NA | Yes | No |
| L533M | −0.36 | 0.12 | −0.29 | 0.12 | −0.12 | 0.17 | No | No |
| L533P | −0.18 | 0.07 | −0.06 | 0.07 | −0.28 | 0.12 | No | No |
| L533V | −1.49 | 0.12 | −0.64 | 0.09 | −0.58 | 0.19 | No | No |
| N534A | −1.49 | 0.08 | −1.30 | 0.08 | −0.31 | 0.09 | No | No |
| N534R | −1.13 | 0.05 | −1.37 | 0.06 | −0.52 | 0.04 | No | No |
| N534D | −1.07 | 0.08 | −0.72 | 0.07 | −0.75 | 0.11 | No | No |
| N534C | −1.50 | 0.13 | −1.27 | 0.12 | 0.19 | 0.20 | Yes | No |
| N534Q | NA | NA | NA | NA | −0.67 | 0.24 | Yes | No |
| N534E | −2.05 | 0.10 | −1.48 | 0.08 | −1.32 | 0.13 | No | No |
| N534G | −1.43 | 0.04 | −0.96 | 0.04 | −1.10 | 0.04 | No | No |
| N534H | −0.18 | 0.03 | −0.50 | 0.04 | −0.20 | 0.06 | No | No |
| N534I | −0.54 | 0.08 | 0.00 | 0.07 | −0.60 | 0.18 | Yes | No |
| N534L | −1.92 | 0.11 | −1.79 | 0.11 | −0.26 | 0.07 | No | No |
| N534K | −1.00 | 0.07 | −0.74 | 0.07 | −0.01 | 0.10 | No | No |
| N534M | −1.72 | 0.12 | −0.90 | 0.09 | 0.88 | 0.19 | Yes | No |
| N534F | 0.11 | 0.10 | −1.16 | 0.16 | 0.16 | 0.30 | Yes | No |
| N534P | −0.33 | 0.07 | −0.26 | 0.07 | −1.27 | 0.16 | No | No |
| N534S | −1.00 | 0.06 | −0.72 | 0.06 | 0.22 | 0.05 | Yes | No |
| N534* | −1.20 | 0.09 | −2.22 | 0.15 | −1.84 | 0.10 | No | No |
| N534T | −0.38 | 0.04 | −0.40 | 0.04 | 0.49 | 0.06 | Yes | No |
| N534W | −1.54 | 0.08 | −0.69 | 0.06 | −0.29 | 0.07 | No | No |
| N534Y | −0.97 | 0.12 | −0.47 | 0.10 | −0.57 | 0.17 | No | No |
| N534V | −1.35 | 0.07 | −1.17 | 0.06 | −0.59 | 0.06 | No | No |
| N534A | NA | NA | NA | NA | −0.33 | 0.09 | Yes | No |
| N534R | NA | NA | NA | NA | −0.55 | 0.04 | Yes | No |
| N534D | −0.11 | 0.09 | −0.10 | 0.09 | −0.69 | 0.10 | No | No |
| N534C | NA | NA | NA | NA | 0.16 | 0.19 | Yes | No |
| N534Q | NA | NA | NA | NA | −0.72 | 0.24 | Yes | No |
| N534E | NA | NA | NA | NA | −1.34 | 0.13 | Yes | No |
| N534G | NA | NA | NA | NA | −1.11 | 0.04 | Yes | No |
| N534H | NA | NA | NA | NA | −0.19 | 0.24 | Yes | No |
| N534I | −0.14 | 0.19 | −0.05 | 0.19 | −0.61 | 0.19 | No | No |
| N534L | NA | NA | NA | NA | −0.22 | 0.07 | Yes | No |
| N534K | −0.47 | 0.14 | −0.26 | 0.13 | −0.06 | 0.09 | No | No |
| N534M | NA | NA | NA | NA | 0.83 | 0.18 | Yes | No |
| N534F | NA | NA | NA | NA | 0.26 | 0.30 | Yes | No |
| N534S | −0.15 | 0.07 | −0.03 | 0.07 | 0.20 | 0.05 | Yes | No |
| N534* | NA | NA | NA | NA | −1.73 | 0.10 | Yes | No |
| N534T | NA | NA | NA | NA | 0.91 | 0.15 | Yes | No |
| N534W | NA | NA | NA | NA | −0.32 | 0.07 | Yes | No |
| N534Y | −0.01 | 0.13 | 0.04 | 0.13 | −0.53 | 0.16 | Yes | No |
| N534V | NA | NA | NA | NA | −0.57 | 0.06 | Yes | No |
| F535A | −1.29 | 0.08 | −1.38 | 0.09 | −1.53 | 0.15 | No | No |
| F535R | −2.11 | 0.10 | −1.42 | 0.08 | −1.73 | 0.13 | No | No |
| F535C | −0.48 | 0.06 | −0.52 | 0.06 | −0.79 | 0.05 | No | No |
| F535E | −2.40 | 0.14 | −1.29 | 0.09 | −1.54 | 0.09 | No | No |
| F535G | −1.68 | 0.06 | −1.41 | 0.05 | −1.60 | 0.04 | No | No |
| F535I | −0.99 | 0.13 | −0.63 | 0.12 | NA | NA | Yes | No |
| F535L | −0.97 | 0.06 | −0.52 | 0.05 | −0.92 | 0.05 | No | No |
| F535M | −0.78 | 0.11 | −0.99 | 0.13 | −0.68 | 0.24 | No | No |
| F535S | −0.91 | 0.06 | −0.54 | 0.06 | −1.11 | 0.09 | No | No |
| F535W | −2.13 | 0.11 | −1.41 | 0.09 | −1.73 | 0.15 | No | No |
| F535Y | −0.65 | 0.10 | −0.50 | 0.10 | −0.62 | 0.16 | No | No |
| F535V | −0.87 | 0.04 | −1.00 | 0.05 | −0.98 | 0.04 | No | No |
| F535A | NA | NA | NA | NA | −1.47 | 0.15 | Yes | No |
| F535R | NA | NA | NA | NA | −1.74 | 0.12 | Yes | No |
| F535C | −0.09 | 0.06 | 0.09 | 0.05 | −0.54 | 0.06 | Yes | No |
| F535E | NA | NA | NA | NA | −1.65 | 0.09 | Yes | No |
| F535G | NA | NA | NA | NA | −1.93 | 0.04 | Yes | No |
| F535L | −0.04 | 0.06 | 0.03 | 0.06 | −0.69 | 0.05 | Yes | No |
| F535M | NA | NA | NA | NA | −0.67 | 0.21 | Yes | No |
| F535S | −0.14 | 0.08 | 0.00 | 0.08 | −1.14 | 0.09 | No | No |
| F535W | NA | NA | NA | NA | −1.68 | 0.14 | Yes | No |
| F535Y | −0.19 | 0.12 | −0.06 | 0.12 | −0.53 | 0.17 | No | No |
| F535V | −0.05 | 0.05 | −0.01 | 0.05 | −0.76 | 0.06 | No | No |
| Q536A | NA | NA | NA | NA | −0.02 | 0.19 | Yes | No |
| Q536R | 0.02 | 0.08 | −0.02 | 0.09 | 0.08 | 0.05 | Yes | No |
| Q536D | NA | NA | NA | NA | 0.23 | 0.28 | Yes | No |
| Q536C | NA | NA | NA | NA | −1.02 | 0.28 | Yes | No |
| Q536E | 0.00 | 0.16 | 0.02 | 0.16 | −0.66 | 0.08 | Yes | No |
| Q536G | NA | NA | NA | NA | 1.22 | 0.05 | Yes | No |
| Q536H | −0.05 | 0.19 | −0.05 | 0.19 | −0.34 | 0.22 | No | No |
| Q536L | −0.10 | 0.15 | −0.11 | 0.15 | −1.09 | 0.14 | No | No |
| Q536K | 0.56 | 0.09 | −0.36 | 0.11 | −0.09 | 0.13 | Yes | No |
| Q536S | NA | NA | NA | NA | 0.60 | 0.09 | Yes | No |
| Q536* | 0.15 | 0.09 | 0.03 | 0.10 | −0.74 | 0.10 | Yes | No |
| Q536V | NA | NA | NA | NA | −1.88 | 0.09 | Yes | No |
| R537A | −1.11 | 0.10 | −1.99 | 0.15 | NA | NA | Yes | No |
| R537Q | −0.56 | 0.13 | −1.08 | 0.16 | NA | NA | Yes | No |
| R537E | −1.40 | 0.13 | −1.33 | 0.13 | NA | NA | Yes | No |
| R537G | −1.10 | 0.05 | −1.07 | 0.05 | NA | NA | Yes | No |
| R537L | −1.50 | 0.13 | −1.38 | 0.12 | NA | NA | Yes | No |
| R537K | −0.58 | 0.09 | −0.81 | 0.10 | NA | NA | Yes | No |
| R537M | −1.57 | 0.02 | −1.19 | 0.02 | NA | NA | Yes | No |
| R537S | −1.30 | 0.11 | −0.65 | 0.08 | NA | NA | Yes | No |
| R537W | −1.42 | 0.10 | −1.60 | 0.11 | NA | NA | Yes | No |
| R537V | −1.52 | 0.11 | −1.85 | 0.12 | NA | NA | Yes | No |
| M537A | NA | NA | NA | NA | −1.52 | 0.24 | Yes | No |
| M537R | NA | NA | NA | NA | 1.70 | 0.04 | Yes | No |
| M537G | NA | NA | NA | NA | −1.55 | 0.08 | Yes | No |
| M537I | NA | NA | NA | NA | −0.01 | 0.15 | Yes | No |
| M537L | NA | NA | NA | NA | −0.09 | 0.13 | Yes | No |
| M537K | NA | NA | NA | NA | 0.19 | 0.14 | Yes | No |
| M537T | NA | NA | NA | NA | −0.29 | 0.13 | Yes | No |
| M537W | NA | NA | NA | NA | −1.30 | 0.19 | Yes | No |
| M537V | NA | NA | NA | NA | −0.62 | 0.10 | Yes | No |
| P538A | NA | NA | NA | NA | −1.19 | 0.06 | Yes | No |
| P538R | NA | NA | NA | NA | −1.72 | 0.08 | Yes | No |
| P538Q | NA | NA | NA | NA | −1.46 | 0.11 | Yes | No |
| P538E | NA | NA | NA | NA | −1.79 | 0.22 | Yes | No |
| P538G | NA | NA | NA | NA | −1.67 | 0.09 | Yes | No |
| P538H | −0.20 | 0.17 | −0.19 | 0.17 | NA | NA | Yes | No |
| P538L | −0.23 | 0.12 | −0.09 | 0.11 | −1.49 | 0.05 | No | No |
| P538S | 0.19 | 0.12 | 0.18 | 0.12 | −1.47 | 0.11 | Yes | No |
| P538T | −0.08 | 0.06 | 0.13 | 0.06 | −0.38 | 0.06 | Yes | No |
| P538W | NA | NA | NA | NA | −1.82 | 0.17 | Yes | No |
| P538V | NA | NA | NA | NA | −0.71 | 0.14 | Yes | No |
| T539A | 0.08 | 0.07 | −0.03 | 0.08 | −1.10 | 0.06 | Yes | No |
| T539R | NA | NA | NA | NA | −1.51 | 0.10 | Yes | No |
| T539N | 0.16 | 0.14 | 0.06 | 0.15 | −1.00 | 0.17 | Yes | No |
| T539C | NA | NA | NA | NA | −1.11 | 0.14 | Yes | No |
| T539Q | NA | NA | NA | NA | −1.19 | 0.20 | Yes | No |
| T539E | NA | NA | NA | NA | −1.61 | 0.12 | Yes | No |
| T539G | NA | NA | NA | NA | −1.63 | 0.05 | Yes | No |
| T539I | −0.20 | 0.13 | 0.00 | 0.13 | −1.04 | 0.16 | No | No |
| T539L | NA | NA | NA | NA | −2.07 | 0.13 | Yes | No |
| T539K | NA | NA | NA | NA | −1.23 | 0.26 | Yes | No |
| T539M | NA | NA | NA | NA | −1.64 | 0.18 | Yes | No |
| T539P | −0.33 | 0.14 | −0.40 | 0.14 | −1.51 | 0.14 | No | No |
| T539S | −0.03 | 0.05 | −0.17 | 0.05 | −0.14 | 0.04 | No | No |
| T539V | NA | NA | NA | NA | −1.65 | 0.11 | Yes | No |
| L540R | −0.17 | 0.15 | −0.30 | 0.15 | −1.27 | 0.14 | No | No |
| L540Q | 0.12 | 0.08 | 0.13 | 0.08 | −0.05 | 0.08 | Yes | No |
| L540G | NA | NA | NA | NA | −1.83 | 0.13 | Yes | No |
| L540M | 0.04 | 0.08 | −0.02 | 0.09 | −0.13 | 0.07 | Yes | No |
| L540P | 0.05 | 0.09 | 0.09 | 0.09 | −0.40 | 0.13 | Yes | No |
| L540V | NA | NA | NA | NA | −1.58 | 0.24 | Yes | No |
| A541R | NA | NA | NA | NA | −1.71 | 0.09 | Yes | No |
| A541D | 0.11 | 0.12 | 0.35 | 0.11 | −0.22 | 0.06 | Yes | No |
| A541C | NA | NA | NA | NA | 0.02 | 0.39 | Yes | No |
| A541G | 0.38 | 0.07 | 0.36 | 0.07 | −0.06 | 0.12 | Yes | No |
| A541L | NA | NA | NA | NA | 0.32 | 0.23 | Yes | No |
| A541S | −0.11 | 0.15 | −0.14 | 0.15 | −1.66 | 0.14 | No | No |
| A541T | −0.11 | 0.05 | −0.11 | 0.05 | −0.50 | 0.12 | No | No |
| A541V | −0.06 | 0.09 | 0.00 | 0.09 | −0.77 | 0.12 | No | No |
| S542N | 0.24 | 0.09 | 0.02 | 0.09 | 0.29 | 0.07 | Yes | Yes |
| S542C | 0.03 | 0.17 | 0.15 | 0.17 | 0.42 | 0.16 | Yes | Yes |
| S542A | NA | NA | NA | NA | 0.79 | 0.05 | Yes | No |
| S542R | −0.37 | 0.10 | −0.13 | 0.10 | 1.34 | 0.04 | Yes | No |
| S542D | NA | NA | NA | NA | −0.70 | 0.14 | Yes | No |
| S542Q | NA | NA | NA | NA | 0.04 | 0.23 | Yes | No |
| S542E | NA | NA | NA | NA | −1.68 | 0.07 | Yes | No |
| S542G | 0.23 | 0.07 | −0.10 | 0.08 | −0.79 | 0.06 | Yes | No |
| S542H | NA | NA | NA | NA | 0.08 | 0.35 | Yes | No |
| S542I | NA | NA | NA | NA | −0.13 | 0.32 | Yes | No |
| S542L | NA | NA | NA | NA | 0.67 | 0.10 | Yes | No |
| S542K | NA | NA | NA | NA | 1.36 | 0.09 | Yes | No |
| S542M | NA | NA | NA | NA | 1.10 | 0.11 | Yes | No |
| S542P | NA | NA | NA | NA | −0.85 | 0.27 | Yes | No |
| S542T | 0.68 | 0.17 | 0.24 | 0.19 | −0.08 | 0.10 | Yes | No |
| S542W | NA | NA | NA | NA | −0.34 | 0.06 | Yes | No |
| S542V | NA | NA | NA | NA | 0.38 | 0.08 | Yes | No |
| G543A | −2.33 | 0.07 | −1.64 | 0.05 | −2.12 | 0.10 | No | No |
| G543R | −1.78 | 0.05 | −1.75 | 0.05 | −1.89 | 0.07 | No | No |
| G543D | −1.02 | 0.07 | −1.88 | 0.09 | NA | NA | Yes | No |
| G543C | −0.32 | 0.04 | −0.29 | 0.04 | −0.07 | 0.06 | No | No |
| G543E | −2.56 | 0.11 | −1.80 | 0.08 | −2.09 | 0.18 | No | No |
| G543I | −1.30 | 0.14 | −1.24 | 0.13 | NA | NA | Yes | No |
| G543L | −1.74 | 0.08 | −1.17 | 0.06 | −1.85 | 0.22 | No | No |
| G543F | −0.91 | 0.09 | −0.77 | 0.08 | −0.93 | 0.14 | No | No |
| G543P | −1.28 | 0.08 | −1.18 | 0.08 | −1.40 | 0.22 | No | No |
| G543S | −1.21 | 0.05 | −1.22 | 0.05 | −1.63 | 0.08 | No | No |
| G543* | −1.66 | 0.13 | −1.93 | 0.14 | NA | NA | Yes | No |
| G543W | −1.55 | 0.08 | −1.49 | 0.07 | NA | NA | Yes | No |
| G543V | −0.80 | 0.03 | −0.81 | 0.03 | −0.80 | 0.06 | No | No |
| W544A | −1.17 | 0.05 | −1.90 | 0.06 | −1.67 | 0.09 | No | No |
| W544R | −1.30 | 0.03 | −1.40 | 0.03 | −1.35 | 0.04 | No | No |
| W544N | −1.11 | 0.10 | −1.78 | 0.13 | NA | NA | Yes | No |
| W544D | −1.61 | 0.09 | −1.58 | 0.09 | −1.51 | 0.14 | No | No |
| W544C | −0.88 | 0.06 | −1.34 | 0.07 | −1.21 | 0.10 | No | No |
| W544Q | −1.24 | 0.08 | −1.17 | 0.08 | NA | NA | Yes | No |
| W544E | −1.14 | 0.05 | −1.44 | 0.05 | −1.54 | 0.06 | No | No |
| W544G | −1.68 | 0.03 | −1.47 | 0.03 | −1.55 | 0.04 | No | No |
| W544H | −0.01 | 0.08 | −1.46 | 0.13 | NA | NA | Yes | No |
| W544L | −1.76 | 0.06 | −1.40 | 0.05 | −1.41 | 0.04 | No | No |
| W544K | −2.26 | 0.11 | −1.33 | 0.07 | −1.39 | 0.08 | No | No |
| W544M | −2.09 | 0.11 | −1.42 | 0.08 | −1.45 | 0.15 | No | No |
| W544F | −0.96 | 0.09 | −1.72 | 0.12 | NA | NA | Yes | No |
| W544P | −1.84 | 0.09 | −1.34 | 0.08 | −1.51 | 0.09 | No | No |
| W544S | −0.66 | 0.03 | −0.59 | 0.03 | −0.57 | 0.03 | No | No |
| W544* | −0.85 | 0.05 | −1.05 | 0.05 | −1.09 | 0.07 | No | No |
| W544T | −1.81 | 0.09 | −1.08 | 0.07 | −1.83 | 0.17 | No | No |
| W544V | −1.60 | 0.05 | −1.52 | 0.05 | −1.52 | 0.09 | No | No |
| D545A | −1.34 | 0.06 | −1.18 | 0.06 | −1.75 | 0.13 | No | No |
| D545R | −2.22 | 0.08 | −1.82 | 0.06 | −1.53 | 0.12 | No | No |
| D545N | −1.00 | 0.10 | −0.89 | 0.09 | −1.05 | 0.15 | No | No |
| D545C | −2.14 | 0.13 | −1.41 | 0.10 | NA | NA | Yes | No |
| D545E | −1.54 | 0.07 | −2.07 | 0.09 | −1.66 | 0.14 | No | No |
| D545G | −1.30 | 0.04 | −1.13 | 0.04 | −1.44 | 0.07 | No | No |
| D545H | −1.20 | 0.14 | −0.72 | 0.12 | NA | NA | Yes | No |
| D545L | −1.77 | 0.08 | −1.23 | 0.06 | −1.75 | 0.21 | No | No |
| D545K | −1.83 | 0.15 | −1.54 | 0.14 | NA | NA | Yes | No |
| D545M | −1.30 | 0.11 | −0.90 | 0.10 | NA | NA | Yes | No |
| D545P | −1.73 | 0.12 | −1.07 | 0.09 | NA | NA | Yes | No |
| D545S | −0.99 | 0.06 | −0.97 | 0.06 | −1.65 | 0.18 | No | No |
| D545T | −2.02 | 0.14 | −1.36 | 0.10 | −1.24 | 0.25 | No | No |
| D545W | −2.52 | 0.12 | −2.44 | 0.12 | −1.79 | 0.16 | No | No |
| D545Y | −1.34 | 0.12 | −1.40 | 0.12 | NA | NA | Yes | No |
| D545V | −1.90 | 0.07 | −1.31 | 0.05 | −1.58 | 0.10 | No | No |
| V546A | 0.05 | 0.04 | −0.28 | 0.04 | −1.03 | 0.08 | Yes | No |
| V546R | −0.34 | 0.04 | −0.10 | 0.04 | −0.24 | 0.05 | No | No |
| V546D | −1.89 | 0.14 | −0.98 | 0.10 | −1.80 | 0.23 | No | No |
| V546C | −0.63 | 0.08 | 0.12 | 0.06 | −1.17 | 0.18 | Yes | No |
| V546Q | −0.14 | 0.09 | −0.04 | 0.08 | −0.37 | 0.22 | No | No |
| V546E | −0.85 | 0.06 | −0.72 | 0.06 | −1.16 | 0.10 | No | No |
| V546G | −0.89 | 0.03 | −0.75 | 0.03 | −1.38 | 0.06 | No | No |
| V546I | 0.17 | 0.09 | −0.21 | 0.10 | −0.01 | 0.36 | Yes | No |
| V546L | −0.09 | 0.04 | −0.03 | 0.04 | −0.77 | 0.12 | No | No |
| V546K | −0.23 | 0.09 | −0.07 | 0.09 | −0.28 | 0.09 | No | No |
| V546M | −0.48 | 0.06 | −0.39 | 0.06 | −0.14 | 0.11 | No | No |
| V546F | −0.58 | 0.10 | −1.20 | 0.13 | NA | NA | Yes | No |
| V546S | −0.24 | 0.05 | −0.75 | 0.06 | −1.19 | 0.07 | No | No |
| V546* | −1.55 | 0.12 | −1.19 | 0.10 | −1.56 | 0.23 | No | No |
| V546T | 0.15 | 0.07 | −0.59 | 0.09 | −0.82 | 0.09 | Yes | No |
| V546W | −1.75 | 0.08 | −1.06 | 0.06 | −1.43 | 0.15 | No | No |
| V546Y | 0.40 | 0.10 | −0.50 | 0.13 | −0.45 | 0.39 | Yes | No |
| N547A | −0.97 | 0.06 | −0.81 | 0.06 | −1.74 | 0.12 | No | No |
| N547R | −0.75 | 0.04 | −0.98 | 0.05 | −1.25 | 0.05 | No | No |
| N547D | −1.06 | 0.08 | −0.98 | 0.08 | −1.08 | 0.12 | No | No |
| N547E | −1.13 | 0.07 | −1.64 | 0.09 | NA | NA | Yes | No |
| N547G | −0.99 | 0.04 | −1.38 | 0.05 | −1.68 | 0.04 | No | No |
| N547I | −0.57 | 0.10 | −0.69 | 0.10 | −0.97 | 0.15 | No | No |
| N547L | −2.14 | 0.12 | −1.01 | 0.07 | −1.56 | 0.18 | No | No |
| N547K | −0.72 | 0.08 | −0.48 | 0.07 | −0.83 | 0.12 | No | No |
| N547S | −0.69 | 0.06 | −0.98 | 0.06 | −1.07 | 0.09 | No | No |
| N547T | −2.13 | 0.13 | −1.62 | 0.11 | NA | NA | Yes | No |
| N547W | −1.69 | 0.09 | −1.84 | 0.10 | NA | NA | Yes | No |
| N547Y | −0.39 | 0.10 | −0.94 | 0.12 | −1.04 | 0.21 | No | No |
| N547V | −1.63 | 0.07 | −1.46 | 0.07 | −1.86 | 0.15 | No | No |
| K548A | −1.24 | 0.04 | −1.12 | 0.04 | −1.74 | 0.03 | No | No |
| K548R | −0.59 | 0.02 | −0.51 | 0.02 | −0.18 | 0.03 | No | No |
| K548N | −0.98 | 0.07 | −1.11 | 0.08 | −1.10 | 0.09 | No | No |
| K548D | −2.69 | 0.13 | −1.63 | 0.08 | −2.01 | 0.14 | No | No |
| K548C | −0.97 | 0.06 | −0.64 | 0.05 | −1.44 | 0.14 | No | No |
| K548Q | −0.31 | 0.04 | −0.24 | 0.04 | −0.41 | 0.06 | No | No |
| K548E | −1.54 | 0.05 | −1.45 | 0.05 | −1.51 | 0.04 | No | No |
| K548G | −1.14 | 0.02 | −0.95 | 0.02 | −1.61 | 0.02 | No | No |
| K548H | −1.58 | 0.14 | −1.58 | 0.14 | NA | NA | Yes | No |
| K548I | −1.05 | 0.07 | −1.27 | 0.08 | −0.98 | 0.06 | No | No |
| K548L | −1.72 | 0.06 | −1.56 | 0.05 | −1.96 | 0.08 | No | No |
| K548M | −0.27 | 0.04 | −0.19 | 0.04 | −1.10 | 0.10 | No | No |
| K548F | −2.01 | 0.12 | −1.60 | 0.10 | NA | NA | Yes | No |
| K548P | −1.78 | 0.09 | −1.04 | 0.07 | −1.86 | 0.16 | No | No |
| K548S | −0.97 | 0.04 | −0.55 | 0.03 | −1.40 | 0.08 | No | No |
| K548* | −1.65 | 0.08 | −0.85 | 0.06 | −1.40 | 0.13 | No | No |
| K548T | −0.12 | 0.04 | −0.74 | 0.05 | −1.19 | 0.07 | No | No |
| K548W | −2.13 | 0.07 | −1.65 | 0.05 | −1.44 | 0.07 | No | No |
| K548Y | −1.07 | 0.09 | −1.63 | 0.11 | NA | NA | Yes | No |
| K548V | −0.72 | 0.03 | −0.39 | 0.03 | −0.97 | 0.05 | No | No |
| E549A | −1.80 | 0.06 | −1.49 | 0.05 | −1.69 | 0.07 | No | No |
| E549R | −1.64 | 0.05 | −1.69 | 0.05 | −1.80 | 0.09 | No | No |
| E549D | −1.63 | 0.09 | −1.13 | 0.07 | −1.53 | 0.14 | No | No |
| E549C | −2.08 | 0.12 | −1.84 | 0.11 | −1.56 | 0.18 | No | No |
| E549Q | −0.41 | 0.05 | −0.41 | 0.05 | −0.80 | 0.10 | No | No |
| E549G | −1.50 | 0.03 | −1.53 | 0.03 | −1.60 | 0.04 | No | No |
| E549I | −1.07 | 0.12 | −1.12 | 0.13 | NA | NA | Yes | No |
| E549L | −1.62 | 0.07 | −1.31 | 0.06 | −1.65 | 0.13 | No | No |
| E549K | −0.91 | 0.07 | −0.89 | 0.07 | −0.99 | 0.08 | No | No |
| E549M | −2.06 | 0.12 | −1.66 | 0.10 | −1.57 | 0.17 | No | No |
| E549F | −1.59 | 0.14 | −1.27 | 0.13 | NA | NA | Yes | No |
| E549S | −2.21 | 0.08 | −1.69 | 0.07 | −1.91 | 0.05 | No | No |
| E549* | −1.66 | 0.09 | −1.47 | 0.09 | −1.59 | 0.14 | No | No |
| E549T | NA | NA | NA | NA | −1.39 | 0.10 | Yes | No |
| E549W | −0.99 | 0.05 | −1.72 | 0.07 | −1.85 | 0.11 | No | No |
| E549V | −1.01 | 0.04 | −0.79 | 0.04 | −1.37 | 0.04 | No | No |
| K550R | 0.05 | 0.03 | 0.18 | 0.03 | 0.17 | 0.07 | Yes | Yes |
| K550A | −0.24 | 0.04 | −0.06 | 0.04 | −0.91 | 0.13 | No | No |
| K550N | 0.11 | 0.07 | −0.13 | 0.07 | −0.46 | 0.13 | Yes | No |
| K550D | −0.86 | 0.09 | 0.22 | 0.07 | −1.48 | 0.23 | Yes | No |
| K550C | −0.08 | 0.07 | −0.18 | 0.07 | −0.84 | 0.21 | No | No |
| K550Q | −0.18 | 0.07 | 0.45 | 0.07 | −0.64 | 0.18 | Yes | No |
| K550E | −0.86 | 0.06 | −0.45 | 0.05 | −1.11 | 0.09 | No | No |
| K550G | −0.25 | 0.02 | −0.16 | 0.02 | −1.14 | 0.04 | No | No |
| K550H | −0.22 | 0.15 | −0.42 | 0.16 | NA | NA | Yes | No |
| K550I | −0.51 | 0.12 | 0.79 | 0.09 | NA | NA | Yes | No |
| K550L | 0.01 | 0.05 | −0.17 | 0.05 | −0.95 | 0.06 | Yes | No |
| K550M | −0.71 | 0.08 | −0.17 | 0.07 | −0.72 | 0.15 | No | No |
| K550F | −0.14 | 0.10 | −0.39 | 0.11 | NA | NA | Yes | No |
| K550P | −0.02 | 0.08 | −0.78 | 0.10 | −0.95 | 0.27 | No | No |
| K550S | −0.07 | 0.05 | −0.22 | 0.05 | −1.05 | 0.08 | No | No |
| K550* | −0.98 | 0.08 | −1.14 | 0.09 | −1.19 | 0.10 | No | No |
| K550T | −0.13 | 0.06 | −0.44 | 0.07 | −0.87 | 0.14 | No | No |
| K550W | 0.18 | 0.04 | 0.20 | 0.04 | −0.66 | 0.07 | Yes | No |
| K550Y | −0.12 | 0.11 | −0.58 | 0.12 | NA | NA | Yes | No |
| K550V | −0.12 | 0.04 | −0.70 | 0.05 | −1.02 | 0.13 | No | No |
| N551D | 0.14 | 0.04 | 0.15 | 0.04 | 0.67 | 0.07 | Yes | Yes |
| N551A | −0.29 | 0.04 | −0.42 | 0.04 | −0.37 | 0.05 | No | No |
| N551R | −0.92 | 0.04 | −1.40 | 0.05 | −1.64 | 0.09 | No | No |
| N551C | −0.52 | 0.08 | −0.26 | 0.08 | −0.39 | 0.28 | No | No |
| N551Q | −0.77 | 0.09 | −0.58 | 0.08 | −0.76 | 0.10 | No | No |
| N551E | −1.32 | 0.06 | −0.66 | 0.05 | −1.51 | 0.10 | No | No |
| N551G | −0.95 | 0.03 | −0.96 | 0.03 | −1.10 | 0.04 | No | No |
| N551H | 0.51 | 0.09 | −1.02 | 0.14 | 0.55 | 0.13 | Yes | No |
| N551I | −0.01 | 0.05 | 0.20 | 0.05 | −0.18 | 0.11 | Yes | No |
| N551L | −0.07 | 0.05 | −0.83 | 0.06 | −1.35 | 0.11 | No | No |
| N551K | −1.43 | 0.07 | −1.28 | 0.07 | −1.22 | 0.08 | No | No |
| N551M | −1.01 | 0.09 | −0.58 | 0.08 | −0.94 | 0.18 | No | No |
| N551F | −0.65 | 0.11 | −0.19 | 0.09 | −0.04 | 0.24 | No | No |
| N551P | −1.24 | 0.10 | −0.91 | 0.09 | −1.21 | 0.12 | No | No |
| N551S | −0.06 | 0.03 | 0.02 | 0.03 | −0.23 | 0.05 | Yes | No |
| N551* | −1.09 | 0.10 | −1.44 | 0.11 | −1.45 | 0.20 | No | No |
| N551T | 0.21 | 0.05 | −0.29 | 0.06 | 0.07 | 0.11 | Yes | No |
| N551W | −0.36 | 0.06 | −0.69 | 0.06 | −0.63 | 0.13 | No | No |
| N551Y | −0.28 | 0.07 | 0.04 | 0.06 | 0.95 | 0.10 | Yes | No |
| N551V | −0.31 | 0.04 | −0.21 | 0.04 | 0.03 | 0.05 | Yes | No |
| N552A | −1.33 | 0.07 | −1.21 | 0.07 | −1.32 | 0.08 | No | No |
| N552R | −1.19 | 0.04 | −1.37 | 0.05 | −1.47 | 0.04 | No | No |
| N552D | −1.18 | 0.07 | −1.04 | 0.06 | −1.24 | 0.06 | No | No |
| N552C | −1.59 | 0.10 | −1.44 | 0.09 | −1.65 | 0.17 | No | No |
| N552Q | −1.21 | 0.11 | −0.81 | 0.10 | NA | NA | Yes | No |
| N552E | −1.93 | 0.09 | −0.57 | 0.05 | −1.89 | 0.06 | No | No |
| N552G | −1.80 | 0.05 | −1.17 | 0.04 | −2.06 | 0.03 | No | No |
| N552H | −0.25 | 0.10 | −0.21 | 0.10 | NA | NA | Yes | No |
| N552I | −0.34 | 0.05 | −0.02 | 0.05 | −0.50 | 0.09 | No | No |
| N552L | −1.13 | 0.07 | −1.91 | 0.10 | −1.73 | 0.12 | No | No |
| N552K | −1.34 | 0.08 | −1.25 | 0.08 | −1.07 | 0.10 | No | No |
| N552M | −1.92 | 0.12 | −1.44 | 0.10 | −1.67 | 0.11 | No | No |
| N552P | −1.69 | 0.12 | −0.81 | 0.09 | NA | NA | Yes | No |
| N552S | −0.11 | 0.03 | −0.20 | 0.03 | −0.58 | 0.05 | No | No |
| N552* | NA | NA | NA | NA | −1.37 | 0.20 | Yes | No |
| N552T | −0.16 | 0.03 | 0.00 | 0.03 | −1.04 | 0.10 | No | No |
| N552W | −1.97 | 0.10 | −1.69 | 0.08 | −1.53 | 0.15 | No | No |
| N552Y | −0.89 | 0.10 | −0.99 | 0.10 | −1.08 | 0.18 | No | No |
| N552V | −1.60 | 0.07 | −1.17 | 0.06 | −1.56 | 0.05 | No | No |
| G553A | −0.56 | 0.05 | −0.61 | 0.05 | −1.53 | 0.11 | No | No |
| G553R | −1.58 | 0.06 | −1.17 | 0.05 | −0.39 | 0.07 | No | No |
| G553D | −0.48 | 0.08 | −0.91 | 0.09 | −0.94 | 0.19 | No | No |
| G553Q | −1.38 | 0.15 | −1.10 | 0.14 | NA | NA | Yes | No |
| G553E | −2.07 | 0.11 | −1.79 | 0.10 | −1.67 | 0.17 | No | No |
| G553S | −0.78 | 0.06 | −0.54 | 0.06 | −0.72 | 0.09 | No | No |
| G553* | −1.04 | 0.12 | −1.39 | 0.14 | NA | NA | Yes | No |
| G553W | −1.11 | 0.07 | −1.87 | 0.09 | −1.59 | 0.16 | No | No |
| G553V | −0.34 | 0.03 | −0.24 | 0.03 | −0.30 | 0.05 | No | No |
| A554I | 0.15 | 0.09 | 0.71 | 0.08 | 0.39 | 0.34 | Yes | Yes |
| A554T | 0.45 | 0.04 | 0.32 | 0.05 | 0.93 | 0.07 | Yes | Yes |
| A554V | 0.57 | 0.03 | 0.48 | 0.03 | 0.54 | 0.04 | Yes | Yes |
| A554R | −1.28 | 0.05 | −1.12 | 0.05 | −2.05 | 0.11 | No | No |
| A554N | 0.04 | 0.09 | −0.71 | 0.11 | −0.12 | 0.13 | Yes | No |
| A554D | −1.96 | 0.10 | −0.95 | 0.07 | −0.83 | 0.04 | No | No |
| A554C | −0.05 | 0.07 | 0.32 | 0.06 | 1.05 | 0.09 | Yes | No |
| A554Q | −0.47 | 0.10 | −0.57 | 0.10 | −1.06 | 0.28 | No | No |
| A554E | −1.85 | 0.09 | −0.79 | 0.06 | −1.86 | 0.11 | No | No |
| A554G | −0.43 | 0.03 | −0.54 | 0.03 | −0.70 | 0.04 | No | No |
| A554L | −0.23 | 0.05 | −0.11 | 0.05 | −0.32 | 0.17 | No | No |
| A554M | 0.27 | 0.07 | −0.26 | 0.08 | −0.72 | 0.23 | Yes | No |
| A554P | −1.28 | 0.09 | −1.84 | 0.12 | NA | NA | Yes | No |
| A554S | 0.14 | 0.03 | 0.15 | 0.03 | −0.07 | 0.05 | Yes | No |
| A554* | −1.77 | 0.14 | −1.03 | 0.11 | NA | NA | Yes | No |
| A554W | −1.54 | 0.09 | −2.63 | 0.14 | NA | NA | Yes | No |
| I555V | 0.41 | 0.03 | 0.13 | 0.03 | 0.14 | 0.06 | Yes | Yes |
| I555A | −0.39 | 0.05 | −0.48 | 0.05 | −0.79 | 0.14 | No | No |
| I555R | −0.47 | 0.04 | −1.21 | 0.05 | −0.58 | 0.09 | No | No |
| I555N | −0.51 | 0.08 | −0.76 | 0.08 | −0.76 | 0.13 | No | No |
| I555D | −1.00 | 0.09 | −1.17 | 0.10 | NA | NA | Yes | No |
| I555C | −1.00 | 0.12 | −0.93 | 0.12 | −0.75 | 0.10 | No | No |
| I555Q | −0.79 | 0.11 | −0.92 | 0.11 | −0.84 | 0.21 | No | No |
| I555E | −2.31 | 0.12 | −0.09 | 0.05 | −1.79 | 0.15 | No | No |
| I555G | −1.15 | 0.04 | −1.07 | 0.04 | −1.57 | 0.03 | No | No |
| I555L | 0.18 | 0.05 | −0.03 | 0.05 | −0.30 | 0.14 | Yes | No |
| I555K | −0.71 | 0.09 | −0.03 | 0.07 | −1.33 | 0.11 | No | No |
| I555M | −0.04 | 0.05 | −0.01 | 0.05 | −0.27 | 0.08 | No | No |
| I555F | −0.18 | 0.09 | −0.17 | 0.09 | −0.32 | 0.13 | No | No |
| I555P | −1.29 | 0.11 | −1.66 | 0.13 | −1.11 | 0.36 | No | No |
| I555S | −0.16 | 0.03 | −0.12 | 0.03 | −0.31 | 0.05 | No | No |
| I555T | −0.01 | 0.05 | −0.09 | 0.05 | −0.45 | 0.11 | No | No |
| I555W | −1.78 | 0.11 | −1.29 | 0.09 | −1.81 | 0.15 | No | No |
| I555Y | −1.05 | 0.14 | −1.16 | 0.15 | NA | NA | Yes | No |
| L556M | 0.08 | 0.08 | 0.10 | 0.08 | 0.11 | 0.21 | Yes | Yes |
| L556A | −0.52 | 0.07 | −1.77 | 0.12 | −1.33 | 0.24 | No | No |
| L556R | −1.06 | 0.06 | −0.91 | 0.06 | −1.39 | 0.10 | No | No |
| L556C | −1.31 | 0.13 | −0.58 | 0.10 | NA | NA | Yes | No |
| L556Q | −0.06 | 0.06 | −0.34 | 0.07 | −0.36 | 0.11 | No | No |
| L556G | −1.55 | 0.07 | −1.49 | 0.07 | −1.60 | 0.06 | No | No |
| L556I | 0.58 | 0.12 | 0.07 | 0.14 | NA | NA | Yes | No |
| L556P | −0.19 | 0.07 | −0.54 | 0.08 | −0.91 | 0.13 | No | No |
| L556S | −1.56 | 0.11 | −1.28 | 0.10 | NA | NA | Yes | No |
| L556T | −0.95 | 0.12 | −0.69 | 0.11 | NA | NA | Yes | No |
| L556W | −1.77 | 0.12 | −1.41 | 0.11 | NA | NA | Yes | No |
| L556V | −0.45 | 0.06 | −0.17 | 0.05 | −0.76 | 0.14 | No | No |
| F557A | −0.39 | 0.05 | −0.06 | 0.05 | −0.75 | 0.07 | No | No |
| F557R | −1.79 | 0.06 | −1.05 | 0.05 | −1.57 | 0.08 | No | No |
| F557N | NA | NA | NA | NA | −0.90 | 0.11 | Yes | No |
| F557C | −0.63 | 0.06 | −0.55 | 0.06 | −0.32 | 0.13 | No | No |
| F557Q | −1.87 | 0.15 | −0.40 | 0.09 | −0.98 | 0.25 | No | No |
| F557E | −1.90 | 0.10 | −1.64 | 0.09 | −1.50 | 0.16 | No | No |
| F557G | −1.17 | 0.04 | −1.02 | 0.04 | −0.98 | 0.06 | No | No |
| F557I | −0.32 | 0.05 | −0.07 | 0.04 | −0.05 | 0.08 | No | No |
| F557L | −0.04 | 0.04 | −0.08 | 0.04 | 0.14 | 0.08 | Yes | No |
| F557K | −1.25 | 0.10 | −0.84 | 0.09 | −0.79 | 0.30 | No | No |
| F557M | 0.33 | 0.07 | −0.19 | 0.08 | −0.15 | 0.18 | Yes | No |
| F557P | −1.14 | 0.10 | −1.38 | 0.11 | −1.69 | 0.21 | No | No |
| F557S | −0.87 | 0.05 | −0.74 | 0.05 | −0.48 | 0.09 | No | No |
| F557* | −1.30 | 0.10 | −2.32 | 0.15 | NA | NA | Yes | No |
| F557T | −1.21 | 0.09 | −0.72 | 0.08 | −0.44 | 0.25 | No | No |
| F557W | −0.87 | 0.06 | −0.37 | 0.05 | −1.24 | 0.11 | No | No |
| F557Y | −0.74 | 0.08 | −0.15 | 0.07 | −0.87 | 0.13 | No | No |
| F557V | −0.50 | 0.04 | −0.91 | 0.05 | −0.42 | 0.04 | No | No |
| V558M | 0.24 | 0.06 | 0.15 | 0.06 | 0.10 | 0.12 | Yes | Yes |
| V558A | −0.11 | 0.04 | −0.13 | 0.04 | 0.26 | 0.09 | Yes | No |
| V558R | −0.63 | 0.06 | −0.46 | 0.05 | −0.26 | 0.14 | No | No |
| V558D | 0.64 | 0.09 | 0.05 | 0.10 | −0.46 | 0.14 | Yes | No |
| V558C | −0.01 | 0.12 | 0.01 | 0.12 | −0.28 | 0.55 | Yes | No |
| V558Q | 0.40 | 0.11 | −0.65 | 0.14 | −0.21 | 0.55 | Yes | No |
| V558E | 0.15 | 0.04 | −0.31 | 0.05 | −0.12 | 0.07 | Yes | No |
| V558G | −0.07 | 0.03 | −0.48 | 0.04 | −0.36 | 0.10 | No | No |
| V558L | 0.16 | 0.04 | 0.03 | 0.04 | −0.16 | 0.09 | Yes | No |
| V558K | 0.05 | 0.10 | −0.15 | 0.11 | −0.02 | 0.48 | Yes | No |
| V558F | −0.21 | 0.13 | −0.36 | 0.13 | NA | NA | Yes | No |
| V558S | −0.36 | 0.09 | −0.49 | 0.09 | −0.10 | 0.27 | No | No |
| V558T | −0.19 | 0.12 | −0.28 | 0.12 | 0.15 | 0.41 | Yes | No |
| V558W | −0.76 | 0.10 | −0.75 | 0.10 | −0.93 | 0.30 | No | No |
| K559A | 0.17 | 0.04 | 0.08 | 0.04 | 0.13 | 0.08 | Yes | Yes |
| K559R | 0.14 | 0.03 | −0.02 | 0.03 | 0.11 | 0.06 | Yes | No |
| K559N | 0.05 | 0.03 | 0.05 | 0.03 | −0.04 | 0.05 | Yes | No |
| K559D | 0.25 | 0.08 | −0.33 | 0.09 | −0.39 | 0.25 | Yes | No |
| K559C | 0.31 | 0.08 | −0.20 | 0.09 | −0.05 | 0.22 | Yes | No |
| K559Q | −0.23 | 0.07 | 0.03 | 0.07 | 0.00 | 0.21 | Yes | No |
| K559E | −0.20 | 0.04 | −0.52 | 0.04 | −0.40 | 0.06 | No | No |
| K559G | −0.35 | 0.03 | −0.41 | 0.03 | −0.16 | 0.03 | No | No |
| K559H | 0.53 | 0.14 | −0.21 | 0.16 | NA | NA | Yes | No |
| K559I | −0.62 | 0.12 | 0.01 | 0.10 | NA | NA | Yes | No |
| K559L | −0.39 | 0.06 | −0.29 | 0.06 | −0.71 | 0.13 | No | No |
| K559M | −0.27 | 0.06 | −0.65 | 0.07 | 0.01 | 0.12 | Yes | No |
| K559F | −0.45 | 0.13 | 0.13 | 0.11 | NA | NA | Yes | No |
| K559S | −0.28 | 0.06 | −0.32 | 0.06 | 0.22 | 0.20 | Yes | No |
| K559* | −0.63 | 0.07 | −0.48 | 0.07 | −1.15 | 0.09 | No | No |
| K559T | 0.30 | 0.06 | 0.52 | 0.06 | −0.20 | 0.15 | Yes | No |
| K559W | −0.64 | 0.06 | −0.34 | 0.06 | −0.32 | 0.18 | No | No |
| K559Y | −0.13 | 0.11 | −0.01 | 0.11 | NA | NA | Yes | No |
| K559V | −0.53 | 0.05 | −0.50 | 0.05 | −0.27 | 0.13 | No | No |
| N560A | 0.34 | 0.05 | 0.18 | 0.05 | 0.18 | 0.08 | Yes | Yes |
| N560D | 0.16 | 0.04 | 0.18 | 0.04 | 0.16 | 0.08 | Yes | Yes |
| N560E | 0.48 | 0.06 | 0.28 | 0.06 | 0.11 | 0.25 | Yes | Yes |
| N560M | 0.16 | 0.09 | 0.31 | 0.09 | 0.18 | 0.13 | Yes | Yes |
| N560R | 0.10 | 0.04 | 0.04 | 0.04 | −0.07 | 0.06 | Yes | No |
| N560C | −0.11 | 0.08 | −0.20 | 0.08 | −0.15 | 0.09 | No | No |
| N560Q | 0.55 | 0.09 | −1.07 | 0.14 | −0.09 | 0.38 | Yes | No |
| N560G | 0.01 | 0.04 | 0.03 | 0.04 | −0.02 | 0.09 | Yes | No |
| N560H | −0.35 | 0.13 | −0.17 | 0.13 | NA | NA | Yes | No |
| N560I | 0.22 | 0.05 | 0.28 | 0.05 | −0.13 | 0.10 | Yes | No |
| N560L | −0.64 | 0.08 | −0.16 | 0.07 | −0.12 | 0.11 | No | No |
| N560K | 0.11 | 0.06 | −0.29 | 0.07 | 0.14 | 0.14 | Yes | No |
| N560F | 0.14 | 0.12 | −0.03 | 0.13 | NA | NA | Yes | No |
| N560P | 0.19 | 0.09 | −0.69 | 0.11 | −0.13 | 0.29 | Yes | No |
| N560S | 0.03 | 0.03 | 0.18 | 0.03 | −0.01 | 0.05 | Yes | No |
| N560* | −1.15 | 0.11 | −1.78 | 0.15 | NA | NA | Yes | No |
| N560T | −0.40 | 0.08 | 0.00 | 0.07 | 0.01 | 0.14 | Yes | No |
| N560W | −0.36 | 0.07 | −0.72 | 0.08 | −0.27 | 0.16 | No | No |
| N560Y | −0.24 | 0.09 | 0.04 | 0.08 | 0.07 | 0.12 | Yes | No |
| N560V | 0.13 | 0.06 | −0.15 | 0.06 | −0.11 | 0.16 | Yes | No |
| G561A | −0.10 | 0.05 | −0.36 | 0.06 | −0.05 | 0.07 | No | No |
| G561R | −0.20 | 0.04 | 0.00 | 0.04 | −0.16 | 0.05 | No | No |
| G561N | 0.20 | 0.16 | 1.09 | 0.14 | NA | NA | Yes | No |
| G561D | −0.43 | 0.11 | 0.54 | 0.08 | −0.03 | 0.27 | Yes | No |
| G561C | −0.19 | 0.08 | 0.03 | 0.08 | −0.26 | 0.27 | Yes | No |
| G561Q | −0.15 | 0.12 | 0.67 | 0.10 | −0.08 | 0.26 | Yes | No |
| G561E | 0.14 | 0.06 | −0.19 | 0.06 | −0.05 | 0.14 | Yes | No |
| G561H | 0.74 | 0.14 | 1.07 | 0.14 | NA | NA | Yes | No |
| G561L | −0.57 | 0.09 | −0.30 | 0.09 | −0.60 | 0.09 | No | No |
| G561K | 0.24 | 0.12 | 0.17 | 0.12 | NA | NA | Yes | No |
| G561M | −0.33 | 0.14 | 0.12 | 0.12 | NA | NA | Yes | No |
| G561P | −0.84 | 0.12 | −0.45 | 0.11 | 0.02 | 0.17 | Yes | No |
| G561S | 0.00 | 0.06 | 0.54 | 0.05 | −0.09 | 0.18 | Yes | No |
| G561* | −0.53 | 0.11 | −0.01 | 0.09 | NA | NA | Yes | No |
| G561T | 0.10 | 0.09 | −0.87 | 0.13 | −0.23 | 0.34 | Yes | No |
| G561W | −0.47 | 0.06 | −0.34 | 0.06 | −0.51 | 0.17 | No | No |
| G561V | −0.02 | 0.02 | −0.04 | 0.02 | 0.08 | 0.06 | Yes | No |
| L562A | −0.46 | 0.07 | −0.26 | 0.07 | −0.17 | 0.22 | No | No |
| L562R | −0.38 | 0.05 | 0.08 | 0.04 | −0.17 | 0.08 | Yes | No |
| L562D | −0.37 | 0.13 | −0.90 | 0.15 | −0.46 | 0.35 | No | No |
| L562C | 0.18 | 0.10 | −0.63 | 0.12 | 0.13 | 0.29 | Yes | No |
| L562Q | −0.43 | 0.09 | −0.20 | 0.08 | −0.07 | 0.17 | No | No |
| L562E | −0.32 | 0.07 | −0.62 | 0.08 | −0.29 | 0.18 | No | No |
| L562G | −0.75 | 0.05 | −0.60 | 0.05 | −0.36 | 0.08 | No | No |
| L562H | 0.23 | 0.12 | −0.50 | 0.15 | NA | NA | Yes | No |
| L562K | −0.69 | 0.12 | 0.32 | 0.09 | −0.53 | 0.29 | Yes | No |
| L562M | 0.19 | 0.06 | −0.26 | 0.07 | −0.04 | 0.12 | Yes | No |
| L562F | 0.48 | 0.14 | 0.79 | 0.13 | NA | NA | Yes | No |
| L562P | −0.10 | 0.06 | −0.05 | 0.06 | −0.26 | 0.09 | No | No |
| L562S | −0.65 | 0.10 | −0.27 | 0.09 | −0.04 | 0.26 | No | No |
| L562* | −1.29 | 0.14 | −1.10 | 0.13 | NA | NA | Yes | No |
| L562T | −1.14 | 0.15 | −1.09 | 0.15 | NA | NA | Yes | No |
| L562W | −0.37 | 0.07 | −0.38 | 0.07 | −0.45 | 0.18 | No | No |
| L562Y | −0.63 | 0.16 | −0.49 | 0.16 | NA | NA | Yes | No |
| L562V | −0.20 | 0.05 | −0.49 | 0.06 | −0.71 | 0.11 | No | No |
| Y563A | −1.58 | 0.09 | −1.18 | 0.08 | −1.03 | 0.07 | No | No |
| Y563R | −1.46 | 0.06 | −1.08 | 0.05 | −1.59 | 0.11 | No | No |
| Y563N | −0.16 | 0.08 | 0.04 | 0.07 | −0.30 | 0.16 | Yes | No |
| Y563D | −0.56 | 0.07 | −0.65 | 0.07 | −0.73 | 0.07 | No | No |
| Y563C | −0.49 | 0.06 | −0.50 | 0.06 | −0.32 | 0.09 | No | No |
| Y563Q | −0.48 | 0.10 | −0.52 | 0.10 | −0.93 | 0.25 | No | No |
| Y563E | −1.21 | 0.08 | 0.07 | 0.06 | −1.73 | 0.14 | Yes | No |
| Y563G | −1.13 | 0.04 | −1.64 | 0.05 | −1.26 | 0.03 | No | No |
| Y563H | −0.25 | 0.08 | −0.14 | 0.08 | −0.06 | 0.15 | No | No |
| Y563L | −1.95 | 0.12 | −1.69 | 0.11 | −1.15 | 0.19 | No | No |
| Y563F | 0.13 | 0.07 | 0.06 | 0.07 | −0.06 | 0.11 | Yes | No |
| Y563S | −0.91 | 0.07 | −0.95 | 0.07 | −0.96 | 0.08 | No | No |
| Y563* | −0.54 | 0.08 | −0.93 | 0.09 | −1.33 | 0.14 | No | No |
| Y563T | −1.67 | 0.15 | 0.09 | 0.08 | −0.51 | 0.22 | Yes | No |
| Y563W | −0.84 | 0.06 | −0.78 | 0.05 | −1.12 | 0.11 | No | No |
| Y563V | −1.32 | 0.08 | −1.12 | 0.07 | −1.13 | 0.17 | No | No |
| Y564A | −1.20 | 0.15 | −0.93 | 0.14 | NA | NA | Yes | No |
| Y564R | −1.37 | 0.10 | −1.99 | 0.13 | −1.19 | 0.19 | No | No |
| Y564N | −0.18 | 0.12 | 0.08 | 0.11 | −0.14 | 0.21 | Yes | No |
| Y564D | −0.05 | 0.06 | −0.60 | 0.07 | −0.25 | 0.10 | No | No |
| Y564C | 0.09 | 0.05 | −0.22 | 0.05 | −0.08 | 0.10 | Yes | No |
| Y564G | −1.96 | 0.11 | −1.74 | 0.10 | −1.32 | 0.19 | No | No |
| Y564H | −0.05 | 0.08 | −0.10 | 0.08 | 0.04 | 0.13 | Yes | No |
| Y564L | −0.24 | 0.10 | −1.01 | 0.13 | NA | NA | Yes | No |
| Y564F | −0.04 | 0.11 | 0.35 | 0.10 | NA | NA | Yes | No |
| Y564S | −0.47 | 0.09 | −0.36 | 0.08 | −0.35 | 0.20 | No | No |
| Y564* | −0.43 | 0.11 | −0.68 | 0.12 | NA | NA | Yes | No |
| Y564W | −0.37 | 0.10 | 0.03 | 0.09 | −0.52 | 0.29 | Yes | No |
| Y564V | −1.90 | 0.15 | −0.72 | 0.10 | NA | NA | Yes | No |
| L565A | −0.65 | 0.07 | −0.47 | 0.06 | −1.27 | 0.23 | No | No |
| L565R | −0.27 | 0.03 | −0.79 | 0.03 | −0.12 | 0.05 | No | No |
| L565C | −1.21 | 0.13 | −0.10 | 0.09 | −0.66 | 0.24 | No | No |
| L565Q | −0.36 | 0.08 | −0.84 | 0.09 | −0.76 | 0.15 | No | No |
| L565E | −1.93 | 0.12 | −1.02 | 0.09 | −1.55 | 0.19 | No | No |
| L565G | −2.36 | 0.08 | −1.62 | 0.06 | −1.50 | 0.10 | No | No |
| L565I | −0.07 | 0.13 | −0.42 | 0.14 | NA | NA | Yes | No |
| L565M | −0.20 | 0.07 | −0.26 | 0.07 | 0.03 | 0.10 | Yes | No |
| L565P | −0.60 | 0.07 | −0.92 | 0.08 | −0.67 | 0.13 | No | No |
| L565S | −1.07 | 0.09 | −0.75 | 0.08 | −1.13 | 0.08 | No | No |
| L565W | −1.64 | 0.10 | −2.31 | 0.13 | NA | NA | Yes | No |
| L565V | −0.57 | 0.06 | −0.48 | 0.05 | −1.19 | 0.13 | No | No |
| G566A | −0.36 | 0.08 | −0.39 | 0.08 | −0.57 | 0.21 | No | No |
| G566R | −1.37 | 0.09 | −1.97 | 0.12 | −1.83 | 0.11 | No | No |
| G566D | −0.67 | 0.11 | −1.03 | 0.12 | −0.62 | 0.18 | No | No |
| G566C | −0.08 | 0.11 | −0.83 | 0.13 | NA | NA | Yes | No |
| G566S | −0.14 | 0.06 | −0.40 | 0.07 | −0.18 | 0.11 | No | No |
| G566V | −0.52 | 0.07 | −0.99 | 0.08 | −0.68 | 0.10 | No | No |
| I567A | −1.35 | 0.11 | −1.01 | 0.09 | −1.13 | 0.07 | No | No |
| I567R | −1.78 | 0.09 | −0.11 | 0.05 | −1.44 | 0.11 | No | No |
| I567N | −0.05 | 0.07 | −0.10 | 0.07 | 0.15 | 0.10 | Yes | No |
| I567E | −1.64 | 0.12 | −1.70 | 0.13 | NA | NA | Yes | No |
| I567G | −1.23 | 0.06 | −1.14 | 0.06 | −1.70 | 0.09 | No | No |
| I567L | −0.67 | 0.08 | 0.29 | 0.06 | −0.48 | 0.13 | Yes | No |
| I567M | −0.51 | 0.09 | −0.82 | 0.10 | −0.88 | 0.10 | No | No |
| I567F | −0.43 | 0.12 | 0.00 | 0.11 | −0.48 | 0.19 | No | No |
| I567S | −0.56 | 0.07 | −0.67 | 0.07 | −0.82 | 0.12 | No | No |
| I567T | −0.15 | 0.05 | −0.27 | 0.06 | 0.13 | 0.09 | Yes | No |
| I567W | −1.85 | 0.12 | −2.17 | 0.14 | −1.22 | 0.13 | No | No |
| I567V | −0.54 | 0.05 | −0.26 | 0.05 | −0.68 | 0.08 | No | No |
| M568A | −0.52 | 0.06 | −0.34 | 0.06 | −0.04 | 0.11 | No | No |
| M568R | −0.30 | 0.04 | −0.82 | 0.05 | −0.20 | 0.07 | No | No |
| M568C | −0.33 | 0.10 | −0.78 | 0.11 | −0.18 | 0.28 | No | No |
| M568Q | −0.61 | 0.12 | −0.40 | 0.12 | NA | NA | Yes | No |
| M568E | −1.29 | 0.09 | −0.86 | 0.08 | −1.65 | 0.22 | No | No |
| M568G | −1.32 | 0.05 | −0.45 | 0.04 | −0.80 | 0.04 | No | No |
| M568H | 0.40 | 0.14 | −0.11 | 0.15 | NA | NA | Yes | No |
| M568I | 0.16 | 0.05 | −0.01 | 0.06 | 0.15 | 0.11 | Yes | No |
| M568L | −0.42 | 0.06 | −0.23 | 0.05 | −0.27 | 0.09 | No | No |
| M568K | −0.19 | 0.08 | −0.20 | 0.08 | −0.17 | 0.16 | No | No |
| M568P | −1.11 | 0.13 | −0.81 | 0.12 | NA | NA | Yes | No |
| M568S | 0.29 | 0.06 | −0.47 | 0.07 | −0.54 | 0.22 | Yes | No |
| M568T | −0.13 | 0.06 | −0.25 | 0.06 | −0.07 | 0.12 | No | No |
| M568W | −0.20 | 0.06 | 0.14 | 0.05 | −0.93 | 0.18 | Yes | No |
| M568V | −0.26 | 0.04 | −0.28 | 0.04 | 0.06 | 0.08 | Yes | No |
| P569D | 0.60 | 0.08 | 0.33 | 0.08 | 1.25 | 0.11 | Yes | Yes |
| P569A | −0.12 | 0.05 | −0.39 | 0.05 | 0.23 | 0.08 | Yes | No |
| P569R | −0.60 | 0.04 | −0.52 | 0.04 | −0.13 | 0.05 | No | No |
| P569N | −0.14 | 0.14 | −0.71 | 0.16 | NA | NA | Yes | No |
| P569C | −1.16 | 0.09 | −0.36 | 0.07 | 0.07 | 0.19 | Yes | No |
| P569Q | −0.26 | 0.09 | −0.13 | 0.09 | 0.40 | 0.21 | Yes | No |
| P569E | −0.07 | 0.07 | −0.16 | 0.07 | −0.11 | 0.22 | No | No |
| P569G | −0.54 | 0.03 | −0.49 | 0.03 | −0.65 | 0.07 | No | No |
| P569H | 0.12 | 0.09 | −0.25 | 0.10 | 0.16 | 0.17 | Yes | No |
| P569I | 0.03 | 0.13 | −0.32 | 0.14 | 0.10 | 0.31 | Yes | No |
| P569L | −0.47 | 0.05 | −0.21 | 0.04 | −0.30 | 0.11 | No | No |
| P569K | −0.35 | 0.12 | 0.36 | 0.10 | 0.23 | 0.31 | Yes | No |
| P569M | −0.98 | 0.11 | −0.54 | 0.10 | −0.28 | 0.12 | No | No |
| P569F | NA | NA | NA | NA | −0.67 | 0.31 | Yes | No |
| P569S | −0.07 | 0.05 | −0.24 | 0.05 | 0.02 | 0.11 | Yes | No |
| P569T | −0.38 | 0.07 | −0.20 | 0.07 | −0.06 | 0.15 | No | No |
| P569W | −0.74 | 0.06 | −1.07 | 0.07 | −1.18 | 0.14 | No | No |
| P569V | −0.34 | 0.04 | −0.82 | 0.05 | 0.15 | 0.14 | Yes | No |
| K570A | −0.95 | 0.06 | −0.28 | 0.05 | −1.70 | 0.16 | No | No |
| K570R | −0.47 | 0.03 | −0.56 | 0.04 | −0.39 | 0.05 | No | No |
| K570N | −0.30 | 0.11 | −0.73 | 0.12 | NA | NA | Yes | No |
| K570D | −1.38 | 0.12 | −1.42 | 0.13 | NA | NA | Yes | No |
| K570C | −1.71 | 0.11 | −1.70 | 0.11 | NA | NA | Yes | No |
| K570Q | −0.90 | 0.09 | −0.32 | 0.08 | −1.25 | 0.18 | No | No |
| K570E | −1.37 | 0.07 | −0.71 | 0.05 | −1.40 | 0.10 | No | No |
| K570G | −0.62 | 0.03 | −0.33 | 0.03 | −1.61 | 0.09 | No | No |
| K570L | −1.83 | 0.08 | −1.48 | 0.07 | −1.35 | 0.14 | No | No |
| K570M | −1.02 | 0.09 | −0.76 | 0.09 | −1.52 | 0.18 | No | No |
| K570P | −1.15 | 0.12 | −0.12 | 0.09 | NA | NA | Yes | No |
| K570S | −1.28 | 0.09 | −0.51 | 0.07 | −1.52 | 0.14 | No | No |
| K570* | −1.31 | 0.10 | −1.26 | 0.10 | −1.24 | 0.15 | No | No |
| K570T | −0.02 | 0.03 | 0.11 | 0.03 | −0.05 | 0.03 | Yes | No |
| K570W | −2.06 | 0.09 | −2.64 | 0.12 | −1.61 | 0.14 | No | No |
| K570V | −1.33 | 0.06 | −0.81 | 0.05 | −1.85 | 0.11 | No | No |
| Q571A | 0.64 | 0.07 | 0.39 | 0.08 | 1.09 | 0.23 | Yes | Yes |
| Q571P | 0.17 | 0.07 | 0.61 | 0.07 | 0.13 | 0.14 | Yes | Yes |
| Q571S | 0.25 | 0.09 | 0.20 | 0.09 | 0.89 | 0.23 | Yes | Yes |
| Q571T | 0.22 | 0.13 | 0.19 | 0.13 | 0.87 | 0.41 | Yes | Yes |
| Q571R | −0.03 | 0.04 | −0.43 | 0.05 | 0.19 | 0.10 | Yes | No |
| Q571C | −0.60 | 0.16 | 0.23 | 0.12 | −0.33 | 0.24 | Yes | No |
| Q571E | −0.22 | 0.05 | −0.40 | 0.06 | −0.17 | 0.05 | No | No |
| Q571G | 0.00 | 0.06 | −0.25 | 0.06 | −0.41 | 0.18 | No | No |
| Q571H | −0.23 | 0.11 | −0.65 | 0.12 | 0.06 | 0.24 | Yes | No |
| Q571L | −0.41 | 0.07 | −0.45 | 0.07 | −0.66 | 0.11 | No | No |
| Q571K | −0.47 | 0.16 | −0.33 | 0.15 | 0.08 | 0.31 | Yes | No |
| Q571* | −0.59 | 0.11 | −0.27 | 0.10 | −0.67 | 0.17 | No | No |
| Q571W | −0.09 | 0.08 | −0.80 | 0.09 | −0.51 | 0.24 | No | No |
| Q571V | −0.36 | 0.11 | −0.20 | 0.10 | −0.44 | 0.32 | No | No |
| K572E | 0.11 | 0.04 | 0.25 | 0.04 | 0.42 | 0.08 | Yes | Yes |
| K572A | −0.24 | 0.04 | 0.33 | 0.04 | −0.11 | 0.11 | Yes | No |
| K572R | −0.08 | 0.03 | −0.05 | 0.03 | 0.03 | 0.03 | Yes | No |
| K572N | −0.17 | 0.07 | 0.17 | 0.06 | 0.02 | 0.11 | Yes | No |
| K572D | −0.09 | 0.09 | 0.03 | 0.08 | 0.45 | 0.19 | Yes | No |
| K572C | 0.23 | 0.07 | −0.87 | 0.09 | −0.19 | 0.25 | Yes | No |
| K572Q | −0.21 | 0.06 | 0.11 | 0.06 | 0.37 | 0.16 | Yes | No |
| K572G | −0.17 | 0.03 | −0.08 | 0.03 | 0.42 | 0.03 | Yes | No |
| K572H | NA | NA | NA | NA | 0.11 | 0.33 | Yes | No |
| K572L | −0.11 | 0.05 | 0.16 | 0.05 | −0.32 | 0.15 | Yes | No |
| K572M | −0.71 | 0.08 | 0.02 | 0.06 | 0.21 | 0.06 | Yes | No |
| K572P | 0.09 | 0.06 | 0.91 | 0.06 | −0.88 | 0.23 | Yes | No |
| K572S | 0.30 | 0.05 | 0.01 | 0.05 | −0.29 | 0.15 | Yes | No |
| K572* | −1.34 | 0.08 | −0.86 | 0.07 | −0.86 | 0.08 | No | No |
| K572T | −0.04 | 0.04 | −0.09 | 0.04 | −0.24 | 0.07 | No | No |
| K572W | −0.46 | 0.05 | −0.47 | 0.05 | −0.68 | 0.14 | No | No |
| K572Y | −1.04 | 0.16 | −1.01 | 0.15 | NA | NA | Yes | No |
| K572V | −0.08 | 0.04 | −0.31 | 0.04 | −0.71 | 0.04 | No | No |
| G573A | 0.04 | 0.04 | −0.11 | 0.04 | −0.99 | 0.09 | Yes | No |
| G573R | −0.04 | 0.03 | −0.31 | 0.04 | −0.66 | 0.08 | No | No |
| G573N | 0.45 | 0.12 | −0.94 | 0.17 | −0.29 | 0.41 | Yes | No |
| G573D | −0.05 | 0.06 | −0.41 | 0.07 | −0.95 | 0.13 | No | No |
| G573C | −0.22 | 0.06 | −0.35 | 0.06 | −0.42 | 0.11 | No | No |
| G573Q | 0.40 | 0.07 | −0.29 | 0.08 | −0.43 | 0.26 | Yes | No |
| G573E | −0.09 | 0.05 | 0.36 | 0.05 | −0.50 | 0.08 | Yes | No |
| G573H | −0.77 | 0.12 | 0.37 | 0.09 | −0.51 | 0.30 | Yes | No |
| G573L | −0.04 | 0.05 | 0.07 | 0.05 | −0.43 | 0.05 | Yes | No |
| G573K | −1.43 | 0.13 | −0.29 | 0.09 | −0.32 | 0.25 | No | No |
| G573M | −0.32 | 0.10 | −0.32 | 0.09 | −0.28 | 0.26 | No | No |
| G573F | −0.45 | 0.14 | −0.19 | 0.12 | NA | NA | Yes | No |
| G573P | 0.16 | 0.06 | −0.38 | 0.06 | −0.10 | 0.21 | Yes | No |
| G573S | 0.11 | 0.04 | −0.42 | 0.05 | −0.55 | 0.10 | Yes | No |
| G573* | −1.18 | 0.12 | −1.27 | 0.12 | −0.75 | 0.28 | No | No |
| G573T | 0.02 | 0.08 | −0.53 | 0.09 | −0.62 | 0.08 | Yes | No |
| G573W | −0.08 | 0.05 | −0.60 | 0.05 | −0.67 | 0.09 | No | No |
| G573Y | 0.13 | 0.11 | −0.81 | 0.14 | −0.48 | 0.30 | Yes | No |
| G573V | −0.06 | 0.04 | −0.40 | 0.04 | −0.71 | 0.06 | No | No |
| R574A | −0.83 | 0.07 | −0.54 | 0.06 | −0.64 | 0.10 | No | No |
| R574N | −0.85 | 0.17 | −0.69 | 0.16 | NA | NA | Yes | No |
| R574D | −0.32 | 0.10 | −1.05 | 0.13 | NA | NA | Yes | No |
| R574C | 0.58 | 0.07 | 0.15 | 0.07 | −1.16 | 0.22 | Yes | No |
| R574Q | NA | NA | NA | NA | −1.08 | 0.26 | Yes | No |
| R574E | −0.53 | 0.08 | −0.38 | 0.07 | −1.34 | 0.15 | No | No |
| R574G | −0.21 | 0.03 | −0.27 | 0.03 | −0.60 | 0.07 | No | No |
| R574I | −0.50 | 0.11 | −0.47 | 0.11 | NA | NA | Yes | No |
| R574L | −0.36 | 0.07 | −0.25 | 0.07 | −0.78 | 0.18 | No | No |
| R574K | −0.33 | 0.08 | 0.42 | 0.06 | −0.33 | 0.17 | Yes | No |
| R574M | 0.51 | 0.07 | −0.36 | 0.08 | −0.64 | 0.07 | Yes | No |
| R574F | 0.06 | 0.12 | −0.99 | 0.16 | NA | NA | Yes | No |
| R574P | −0.38 | 0.13 | 0.11 | 0.11 | −0.72 | 0.23 | Yes | No |
| R574S | 0.12 | 0.04 | 0.02 | 0.04 | −1.04 | 0.03 | Yes | No |
| R574* | −0.34 | 0.07 | −0.51 | 0.07 | −0.84 | 0.09 | No | No |
| R574T | −0.65 | 0.09 | 0.35 | 0.07 | −0.83 | 0.16 | Yes | No |
| R574W | −0.10 | 0.05 | −0.10 | 0.05 | −0.73 | 0.06 | No | No |
| R574Y | −0.25 | 0.12 | 0.13 | 0.11 | NA | NA | Yes | No |
| R574V | 0.59 | 0.05 | −0.27 | 0.05 | −1.08 | 0.14 | Yes | No |
| Y575G | 0.53 | 0.04 | 0.21 | 0.04 | 0.32 | 0.07 | Yes | Yes |
| Y575M | 0.89 | 0.11 | 0.27 | 0.12 | 0.31 | 0.41 | Yes | Yes |
| Y575A | 0.55 | 0.05 | 0.01 | 0.06 | −0.07 | 0.18 | Yes | No |
| Y575R | 0.15 | 0.05 | −0.04 | 0.06 | −0.56 | 0.10 | Yes | No |
| Y575N | −0.07 | 0.10 | 0.34 | 0.09 | −0.21 | 0.10 | Yes | No |
| Y575D | −0.07 | 0.09 | 0.15 | 0.09 | −0.45 | 0.25 | Yes | No |
| Y575C | 0.20 | 0.06 | 0.17 | 0.06 | −0.26 | 0.09 | Yes | No |
| Y575Q | −0.22 | 0.13 | −0.32 | 0.13 | −0.16 | 0.30 | No | No |
| Y575E | 0.03 | 0.08 | −0.32 | 0.09 | −0.41 | 0.35 | Yes | No |
| Y575H | −0.24 | 0.08 | −0.29 | 0.08 | 0.23 | 0.13 | Yes | No |
| Y575I | 0.04 | 0.14 | −0.37 | 0.15 | NA | NA | Yes | No |
| Y575L | −0.05 | 0.07 | −0.43 | 0.08 | −0.22 | 0.23 | No | No |
| Y575K | 0.95 | 0.11 | 0.22 | 0.12 | NA | NA | Yes | No |
| Y575F | 0.14 | 0.08 | −0.45 | 0.09 | −0.16 | 0.12 | Yes | No |
| Y575P | −0.06 | 0.09 | −0.22 | 0.09 | −0.14 | 0.31 | No | No |
| Y575S | 0.02 | 0.06 | 0.01 | 0.06 | −0.07 | 0.09 | Yes | No |
| Y575* | −0.20 | 0.07 | −0.46 | 0.08 | −0.51 | 0.12 | No | No |
| Y575T | −0.55 | 0.10 | −0.40 | 0.09 | −0.14 | 0.30 | No | No |
| Y575W | −0.44 | 0.09 | 0.31 | 0.07 | −0.36 | 0.16 | Yes | No |
| Y575V | −0.10 | 0.07 | −0.35 | 0.07 | −0.29 | 0.24 | No | No |
| K576C | 0.27 | 0.07 | 0.25 | 0.07 | 0.10 | 0.26 | Yes | Yes |
| K576A | −0.05 | 0.05 | 0.16 | 0.05 | 0.27 | 0.06 | Yes | No |
| K576R | −0.31 | 0.03 | −0.11 | 0.03 | 0.05 | 0.07 | Yes | No |
| K576N | −0.28 | 0.08 | −0.47 | 0.08 | −0.11 | 0.15 | No | No |
| K576D | −0.01 | 0.08 | −0.22 | 0.09 | −1.04 | 0.26 | No | No |
| K576Q | −0.06 | 0.06 | 0.02 | 0.05 | 0.57 | 0.08 | Yes | No |
| K576E | −0.63 | 0.05 | −0.38 | 0.05 | −0.27 | 0.09 | No | No |
| K576G | −0.03 | 0.03 | −0.13 | 0.03 | 0.28 | 0.04 | Yes | No |
| K576H | −0.26 | 0.14 | −0.46 | 0.14 | NA | NA | Yes | No |
| K576I | 0.10 | 0.11 | −0.10 | 0.12 | 0.37 | 0.16 | Yes | No |
| K576L | −0.04 | 0.05 | 0.01 | 0.04 | 0.24 | 0.05 | Yes | No |
| K576M | 0.21 | 0.05 | −0.14 | 0.06 | 0.07 | 0.09 | Yes | No |
| K576F | −0.41 | 0.13 | −1.12 | 0.15 | 0.20 | 0.34 | Yes | No |
| K576P | −0.07 | 0.09 | −1.70 | 0.14 | −0.15 | 0.17 | No | No |
| K576S | −0.20 | 0.05 | −0.43 | 0.06 | 0.64 | 0.15 | Yes | No |
| K576* | −1.75 | 0.10 | −1.41 | 0.08 | −0.09 | 0.15 | No | No |
| K576T | −0.05 | 0.06 | 0.30 | 0.05 | 0.20 | 0.08 | Yes | No |
| K576W | −0.33 | 0.05 | −0.65 | 0.05 | −0.56 | 0.13 | No | No |
| K576Y | −1.23 | 0.16 | −0.48 | 0.12 | NA | NA | Yes | No |
| K576V | −0.36 | 0.04 | −0.69 | 0.05 | 0.38 | 0.07 | Yes | No |
| A577R | −0.12 | 0.03 | −0.60 | 0.04 | 0.88 | 0.06 | Yes | No |
| A577N | 0.11 | 0.09 | −0.85 | 0.11 | 0.34 | 0.13 | Yes | No |
| A577D | −0.06 | 0.05 | −0.11 | 0.05 | −0.37 | 0.13 | No | No |
| A577C | −0.24 | 0.06 | −0.02 | 0.06 | −0.39 | 0.20 | No | No |
| A577Q | −0.37 | 0.07 | 0.63 | 0.06 | 0.10 | 0.23 | Yes | No |
| A577E | −0.66 | 0.05 | −2.12 | 0.09 | −0.27 | 0.14 | No | No |
| A577G | 0.22 | 0.02 | −0.05 | 0.03 | 0.49 | 0.05 | Yes | No |
| A577H | 0.02 | 0.08 | −0.59 | 0.10 | 0.25 | 0.22 | Yes | No |
| A577I | −0.94 | 0.12 | −0.35 | 0.10 | NA | NA | Yes | No |
| A577L | −0.90 | 0.06 | −0.37 | 0.05 | −0.15 | 0.06 | No | No |
| A577K | −0.40 | 0.08 | −0.80 | 0.09 | 1.09 | 0.07 | Yes | No |
| A577M | −0.40 | 0.08 | −0.20 | 0.07 | −0.28 | 0.20 | No | No |
| A577F | −0.79 | 0.11 | −0.99 | 0.12 | −0.78 | 0.19 | No | No |
| A577P | −0.25 | 0.06 | −0.11 | 0.05 | −0.29 | 0.11 | No | No |
| A577S | −0.31 | 0.04 | −0.26 | 0.04 | 0.08 | 0.10 | Yes | No |
| A577* | −1.65 | 0.11 | −1.75 | 0.11 | NA | NA | Yes | No |
| A577T | −0.09 | 0.05 | −0.38 | 0.05 | −0.02 | 0.08 | No | No |
| A577W | −0.63 | 0.05 | −0.66 | 0.05 | −0.66 | 0.08 | No | No |
| A577Y | −0.22 | 0.09 | −0.20 | 0.09 | 0.05 | 0.32 | Yes | No |
| A577V | −0.06 | 0.03 | −0.28 | 0.04 | −0.42 | 0.09 | No | No |
| L578A | −0.22 | 0.03 | −0.43 | 0.03 | −0.20 | 0.07 | No | No |
| L578R | −0.11 | 0.02 | −0.49 | 0.02 | 0.04 | 0.03 | Yes | No |
| L578N | −0.35 | 0.11 | −0.09 | 0.10 | −0.47 | 0.23 | No | No |
| L578D | −0.09 | 0.06 | −0.41 | 0.06 | −0.92 | 0.07 | No | No |
| L578C | 0.05 | 0.04 | −0.34 | 0.05 | −0.03 | 0.10 | Yes | No |
| L578Q | 0.11 | 0.04 | −0.12 | 0.05 | 0.00 | 0.10 | Yes | No |
| L578E | −0.33 | 0.04 | −0.53 | 0.04 | −0.77 | 0.12 | No | No |
| L578G | −0.26 | 0.02 | −0.45 | 0.02 | −0.29 | 0.02 | No | No |
| L578H | −0.27 | 0.07 | 0.10 | 0.06 | 0.03 | 0.14 | Yes | No |
| L578I | −0.28 | 0.09 | 0.32 | 0.08 | 0.22 | 0.23 | Yes | No |
| L578K | −0.62 | 0.07 | −1.21 | 0.09 | 0.50 | 0.20 | Yes | No |
| L578M | −0.12 | 0.03 | −0.21 | 0.03 | −0.03 | 0.05 | No | No |
| L578F | 0.36 | 0.06 | 0.21 | 0.06 | −0.12 | 0.14 | Yes | No |
| L578P | −0.62 | 0.05 | 0.03 | 0.04 | −0.31 | 0.06 | Yes | No |
| L578S | −0.37 | 0.04 | −0.33 | 0.04 | −0.08 | 0.09 | No | No |
| L578* | −1.90 | 0.09 | −1.28 | 0.07 | −1.24 | 0.09 | No | No |
| L578T | −0.29 | 0.06 | −0.06 | 0.05 | 0.26 | 0.06 | Yes | No |
| L578W | −0.37 | 0.03 | −0.41 | 0.03 | −0.08 | 0.04 | No | No |
| L578Y | 0.36 | 0.07 | −0.21 | 0.07 | −0.24 | 0.07 | Yes | No |
| L578V | −0.19 | 0.03 | −0.28 | 0.03 | 0.01 | 0.04 | Yes | No |
| S579T | 0.17 | 0.04 | 0.33 | 0.04 | 0.01 | 0.06 | Yes | Yes |
| S579V | 0.04 | 0.03 | 0.02 | 0.03 | 0.05 | 0.07 | Yes | Yes |
| S579A | −0.06 | 0.03 | 0.06 | 0.02 | 0.08 | 0.03 | Yes | No |
| S579R | 0.04 | 0.03 | −0.11 | 0.03 | −0.15 | 0.05 | Yes | No |
| S579N | −0.19 | 0.07 | −0.45 | 0.08 | −0.39 | 0.23 | No | No |
| S579D | −0.39 | 0.06 | −0.43 | 0.06 | 0.03 | 0.06 | Yes | No |
| S579C | 0.02 | 0.03 | 0.07 | 0.03 | −0.02 | 0.05 | Yes | No |
| S579Q | −0.19 | 0.07 | −0.66 | 0.08 | 0.30 | 0.20 | Yes | No |
| S579E | −0.10 | 0.04 | −0.54 | 0.05 | −0.15 | 0.05 | No | No |
| S579G | −0.25 | 0.03 | −0.12 | 0.02 | 0.11 | 0.05 | Yes | No |
| S579H | 0.09 | 0.08 | −0.15 | 0.08 | −0.18 | 0.12 | Yes | No |
| S579I | −0.05 | 0.06 | 0.25 | 0.06 | 0.04 | 0.15 | Yes | No |
| S579L | −0.65 | 0.04 | −0.32 | 0.04 | 0.11 | 0.05 | Yes | No |
| S579K | −0.15 | 0.06 | −0.55 | 0.07 | 0.13 | 0.22 | Yes | No |
| S579M | −0.18 | 0.06 | 0.05 | 0.05 | 0.28 | 0.19 | Yes | No |
| S579F | 0.27 | 0.04 | 0.16 | 0.04 | −0.08 | 0.07 | Yes | No |
| S579P | −0.19 | 0.05 | −0.75 | 0.05 | −0.05 | 0.10 | No | No |
| S579* | −1.34 | 0.08 | −1.06 | 0.07 | −1.30 | 0.11 | No | No |
| S579W | −0.09 | 0.04 | −0.35 | 0.04 | −0.37 | 0.06 | No | No |
| S579Y | −0.06 | 0.05 | −0.21 | 0.05 | −0.36 | 0.04 | No | No |
| F580A | −0.80 | 0.08 | −0.25 | 0.07 | −1.44 | 0.19 | No | No |
| F580R | −1.58 | 0.09 | −1.48 | 0.08 | −1.26 | 0.19 | No | No |
| F580C | −0.22 | 0.09 | −0.47 | 0.10 | −0.11 | 0.18 | No | No |
| F580E | −0.96 | 0.12 | −0.21 | 0.09 | NA | NA | Yes | No |
| F580G | −0.91 | 0.05 | −1.05 | 0.05 | −1.21 | 0.04 | No | No |
| F580I | −0.14 | 0.09 | −0.06 | 0.09 | −0.17 | 0.28 | No | No |
| F580L | −0.11 | 0.05 | −0.28 | 0.05 | 0.01 | 0.09 | Yes | No |
| F580M | 0.31 | 0.12 | −0.37 | 0.14 | NA | NA | Yes | No |
| F580P | NA | NA | NA | NA | −0.75 | 0.28 | Yes | No |
| F580S | −0.22 | 0.07 | −0.70 | 0.07 | −0.67 | 0.10 | No | No |
| F580W | −1.14 | 0.10 | 0.30 | 0.07 | 0.67 | 0.24 | Yes | No |
| F580Y | 0.39 | 0.11 | −0.45 | 0.14 | −0.09 | 0.23 | Yes | No |
| F580V | 0.18 | 0.06 | −0.33 | 0.06 | −0.52 | 0.13 | Yes | No |
| E581A | −0.08 | 0.03 | 0.16 | 0.03 | −0.13 | 0.06 | Yes | No |
| E581R | −0.31 | 0.03 | −0.14 | 0.03 | −0.36 | 0.04 | No | No |
| E581N | −0.14 | 0.15 | 0.56 | 0.13 | NA | NA | Yes | No |
| E581D | 0.04 | 0.06 | 0.25 | 0.06 | −0.21 | 0.09 | Yes | No |
| E581C | 0.12 | 0.07 | 0.54 | 0.06 | −0.12 | 0.15 | Yes | No |
| E581Q | 0.01 | 0.04 | 0.09 | 0.04 | −0.12 | 0.06 | Yes | No |
| E581G | −0.15 | 0.02 | −0.05 | 0.02 | −0.03 | 0.03 | No | No |
| E581H | −0.31 | 0.12 | 1.00 | 0.10 | −0.67 | 0.35 | Yes | No |
| E581I | −0.12 | 0.14 | 0.03 | 0.13 | 0.40 | 0.44 | Yes | No |
| E581L | 0.09 | 0.04 | −0.12 | 0.04 | 0.29 | 0.12 | Yes | No |
| E581K | −0.10 | 0.05 | −0.02 | 0.05 | −0.33 | 0.07 | No | No |
| E581M | −0.05 | 0.08 | −0.79 | 0.09 | 0.12 | 0.13 | Yes | No |
| E581F | −0.32 | 0.11 | −0.09 | 0.10 | −0.40 | 0.30 | No | No |
| E581P | −0.49 | 0.07 | −0.09 | 0.06 | −0.25 | 0.13 | No | No |
| E581S | 0.00 | 0.05 | −1.01 | 0.06 | −0.11 | 0.06 | Yes | No |
| E581* | −1.00 | 0.07 | −0.93 | 0.07 | −0.92 | 0.13 | No | No |
| E581T | −0.23 | 0.07 | −0.29 | 0.07 | 0.06 | 0.09 | Yes | No |
| E581W | 0.25 | 0.04 | −0.31 | 0.04 | 0.04 | 0.05 | Yes | No |
| E581Y | NA | NA | NA | NA | 0.25 | 0.28 | Yes | No |
| E581V | −0.18 | 0.04 | 0.31 | 0.03 | 0.26 | 0.10 | Yes | No |
| P582A | −0.46 | 0.07 | −0.64 | 0.07 | −0.60 | 0.13 | No | No |
| P582R | 0.24 | 0.05 | −0.24 | 0.06 | −0.48 | 0.17 | Yes | No |
| P582N | −0.02 | 0.05 | −0.24 | 0.05 | −0.22 | 0.11 | No | No |
| P582D | −0.41 | 0.18 | −0.64 | 0.18 | NA | NA | Yes | No |
| P582C | 0.14 | 0.11 | −0.07 | 0.12 | 0.17 | 0.64 | Yes | No |
| P582Q | −0.74 | 0.13 | −0.13 | 0.11 | −0.07 | 0.25 | No | No |
| P582G | −0.10 | 0.06 | −0.80 | 0.07 | −0.50 | 0.18 | No | No |
| P582H | −0.03 | 0.02 | −0.15 | 0.02 | −0.12 | 0.04 | No | No |
| P582L | −0.14 | 0.07 | −0.96 | 0.08 | −0.26 | 0.13 | No | No |
| P582K | −0.33 | 0.19 | 0.97 | 0.15 | NA | NA | Yes | No |
| P582F | NA | NA | NA | NA | 0.02 | 0.55 | Yes | No |
| P582S | 0.19 | 0.06 | 0.48 | 0.05 | −1.33 | 0.16 | Yes | No |
| P582T | −0.13 | 0.03 | −0.19 | 0.03 | −0.48 | 0.06 | No | No |
| P582W | −1.46 | 0.15 | −0.73 | 0.11 | −0.12 | 0.35 | No | No |
| P582V | −0.90 | 0.10 | −0.27 | 0.08 | −0.81 | 0.09 | No | No |
| T583I | 0.04 | 0.08 | 0.11 | 0.07 | 0.07 | 0.17 | Yes | Yes |
| T583A | 0.02 | 0.04 | −0.22 | 0.04 | −0.17 | 0.08 | Yes | No |
| T583R | 0.12 | 0.05 | −0.31 | 0.05 | −0.04 | 0.09 | Yes | No |
| T583N | 0.00 | 0.06 | 0.01 | 0.06 | −0.20 | 0.09 | Yes | No |
| T583D | 0.23 | 0.12 | −0.96 | 0.16 | NA | NA | Yes | No |
| T583C | 0.67 | 0.09 | −0.82 | 0.12 | −0.67 | 0.27 | Yes | No |
| T583Q | NA | NA | NA | NA | −0.28 | 0.36 | Yes | No |
| T583E | −0.62 | 0.10 | 0.01 | 0.09 | −0.72 | 0.28 | Yes | No |
| T583G | −0.17 | 0.05 | −0.35 | 0.05 | 0.16 | 0.06 | Yes | No |
| T583L | −0.09 | 0.06 | −0.72 | 0.07 | −0.24 | 0.22 | No | No |
| T583K | NA | NA | NA | NA | −0.15 | 0.44 | Yes | No |
| T583M | −0.72 | 0.13 | −0.89 | 0.14 | −0.12 | 0.32 | No | No |
| T583F | −0.41 | 0.13 | −0.83 | 0.15 | −0.13 | 0.36 | No | No |
| T583P | −0.14 | 0.08 | −0.64 | 0.08 | −0.37 | 0.14 | No | No |
| T583S | 0.18 | 0.05 | 0.11 | 0.05 | −0.34 | 0.07 | Yes | No |
| T583W | −0.31 | 0.07 | −0.54 | 0.08 | −0.09 | 0.08 | No | No |
| T583V | 0.01 | 0.06 | −0.05 | 0.06 | 0.15 | 0.22 | Yes | No |
| E584H | 0.09 | 0.07 | 0.22 | 0.07 | 0.17 | 0.14 | Yes | Yes |
| E584V | 0.10 | 0.03 | 0.06 | 0.03 | 0.12 | 0.04 | Yes | Yes |
| E584A | −0.01 | 0.03 | 0.09 | 0.03 | 0.10 | 0.06 | Yes | No |
| E584R | −0.23 | 0.03 | −0.12 | 0.03 | −0.10 | 0.05 | No | No |
| E584N | −0.50 | 0.09 | −0.38 | 0.08 | −0.11 | 0.20 | No | No |
| E584D | 0.46 | 0.04 | 0.51 | 0.04 | −0.02 | 0.08 | Yes | No |
| E584C | −0.03 | 0.05 | 0.09 | 0.05 | 0.13 | 0.07 | Yes | No |
| E584Q | 0.09 | 0.07 | −0.88 | 0.08 | −0.09 | 0.10 | Yes | No |
| E584G | −0.02 | 0.02 | 0.06 | 0.02 | 0.16 | 0.04 | Yes | No |
| E584I | 0.32 | 0.07 | −0.34 | 0.08 | −0.03 | 0.20 | Yes | No |
| E584L | −0.27 | 0.04 | 0.00 | 0.04 | −0.06 | 0.10 | No | No |
| E584K | −0.29 | 0.06 | −0.78 | 0.07 | 0.39 | 0.09 | Yes | No |
| E584M | −0.17 | 0.07 | −0.68 | 0.08 | 0.34 | 0.13 | Yes | No |
| E584F | −0.11 | 0.08 | −0.41 | 0.09 | 0.27 | 0.19 | Yes | No |
| E584P | 0.12 | 0.05 | −0.13 | 0.06 | −0.24 | 0.17 | Yes | No |
| E584S | −0.44 | 0.04 | 0.09 | 0.04 | 0.26 | 0.09 | Yes | No |
| E584* | −1.22 | 0.09 | −1.26 | 0.08 | −1.15 | 0.13 | No | No |
| E584T | −0.03 | 0.05 | −0.03 | 0.05 | 0.17 | 0.15 | Yes | No |
| E584W | −0.73 | 0.06 | −0.52 | 0.05 | −0.32 | 0.07 | No | No |
| E584Y | −0.13 | 0.07 | 0.55 | 0.06 | 0.05 | 0.25 | Yes | No |
| K585R | 0.07 | 0.03 | 0.32 | 0.03 | 0.06 | 0.05 | Yes | Yes |
| K585F | 0.51 | 0.09 | 0.04 | 0.09 | 0.61 | 0.36 | Yes | Yes |
| K585A | 0.21 | 0.04 | −0.23 | 0.05 | 0.16 | 0.13 | Yes | No |
| K585N | −0.13 | 0.09 | 0.18 | 0.08 | −0.67 | 0.12 | Yes | No |
| K585D | −0.05 | 0.07 | −0.08 | 0.07 | −0.05 | 0.23 | No | No |
| K585C | −0.25 | 0.07 | −0.61 | 0.08 | −0.11 | 0.29 | No | No |
| K585Q | 0.07 | 0.06 | 0.41 | 0.06 | −0.09 | 0.08 | Yes | No |
| K585E | −0.33 | 0.05 | −0.44 | 0.05 | 0.10 | 0.12 | Yes | No |
| K585G | −0.18 | 0.03 | −0.04 | 0.03 | 0.16 | 0.04 | Yes | No |
| K585H | 0.12 | 0.11 | −0.60 | 0.13 | 0.28 | 0.14 | Yes | No |
| K585I | −1.45 | 0.14 | 0.35 | 0.08 | 0.11 | 0.25 | Yes | No |
| K585L | −0.10 | 0.04 | −0.06 | 0.04 | 0.27 | 0.13 | Yes | No |
| K585M | −0.25 | 0.07 | −0.05 | 0.06 | 0.21 | 0.17 | Yes | No |
| K585P | 0.20 | 0.06 | −0.04 | 0.07 | 0.15 | 0.21 | Yes | No |
| K585S | −0.17 | 0.05 | 0.24 | 0.04 | 0.20 | 0.11 | Yes | No |
| K585* | −0.91 | 0.07 | −0.60 | 0.06 | −0.61 | 0.11 | No | No |
| K585T | 0.08 | 0.05 | −0.30 | 0.05 | 0.05 | 0.07 | Yes | No |
| K585W | −0.21 | 0.05 | −0.15 | 0.05 | 0.18 | 0.16 | Yes | No |
| K585Y | 0.18 | 0.10 | −0.92 | 0.13 | 0.07 | 0.40 | Yes | No |
| K585V | −0.16 | 0.04 | −0.68 | 0.04 | 0.37 | 0.06 | Yes | No |
| T586A | −0.30 | 0.05 | −0.02 | 0.04 | −0.01 | 0.11 | No | No |
| T586R | −0.56 | 0.05 | −0.06 | 0.04 | −0.20 | 0.14 | No | No |
| T586N | −0.07 | 0.05 | 0.15 | 0.05 | −0.02 | 0.07 | Yes | No |
| T586D | −0.41 | 0.12 | 1.10 | 0.09 | 0.41 | 0.30 | Yes | No |
| T586C | −0.60 | 0.11 | −0.45 | 0.10 | 0.10 | 0.29 | Yes | No |
| T586Q | −0.65 | 0.14 | 0.28 | 0.11 | NA | NA | Yes | No |
| T586E | −0.29 | 0.09 | 0.04 | 0.08 | 0.16 | 0.37 | Yes | No |
| T586G | −0.21 | 0.04 | 0.22 | 0.03 | −0.07 | 0.09 | Yes | No |
| T586I | −0.77 | 0.11 | 0.90 | 0.07 | −0.48 | 0.19 | Yes | No |
| T586L | −0.06 | 0.06 | −0.85 | 0.07 | 0.01 | 0.18 | Yes | No |
| T586K | −0.06 | 0.12 | 0.80 | 0.10 | −0.12 | 0.13 | Yes | No |
| T586M | −0.62 | 0.11 | −1.06 | 0.13 | 0.22 | 0.34 | Yes | No |
| T586F | 0.21 | 0.13 | −0.21 | 0.14 | 0.02 | 0.54 | Yes | No |
| T586P | 0.38 | 0.06 | −0.09 | 0.06 | 0.22 | 0.12 | Yes | No |
| T586S | −0.22 | 0.05 | −0.08 | 0.05 | 0.01 | 0.08 | Yes | No |
| T586W | −0.48 | 0.07 | −0.61 | 0.07 | −0.29 | 0.24 | No | No |
| T586Y | NA | NA | NA | NA | 0.24 | 0.26 | Yes | No |
| T586V | −0.97 | 0.07 | −0.13 | 0.05 | 0.13 | 0.17 | Yes | No |
| S587A | NA | NA | NA | NA | 0.45 | 0.32 | Yes | No |
| S587R | 0.15 | 0.08 | −0.61 | 0.09 | −0.34 | 0.15 | Yes | No |
| S587N | −0.30 | 0.13 | −0.31 | 0.13 | −0.26 | 0.18 | No | No |
| S587C | 0.01 | 0.15 | 0.00 | 0.14 | NA | NA | Yes | No |
| S587E | 0.33 | 0.16 | −0.40 | 0.19 | NA | NA | Yes | No |
| S587G | −0.32 | 0.06 | −0.81 | 0.07 | −0.21 | 0.06 | No | No |
| S587L | 0.21 | 0.14 | 0.27 | 0.13 | NA | NA | Yes | No |
| S587T | 0.80 | 0.11 | −0.41 | 0.14 | −0.13 | 0.23 | Yes | No |
| S587V | 0.20 | 0.11 | −0.25 | 0.12 | −0.04 | 0.12 | Yes | No |
| E588A | −0.01 | 0.05 | 0.25 | 0.05 | 0.17 | 0.10 | Yes | No |
| E588R | −0.39 | 0.05 | −0.61 | 0.05 | −0.31 | 0.07 | No | No |
| E588D | 0.00 | 0.08 | −0.12 | 0.08 | −0.55 | 0.13 | Yes | No |
| E588C | −0.64 | 0.11 | −0.35 | 0.10 | 0.00 | 0.10 | No | No |
| E588Q | 0.11 | 0.09 | −0.25 | 0.09 | −0.08 | 0.13 | Yes | No |
| E588G | −0.16 | 0.04 | −0.19 | 0.04 | −0.34 | 0.04 | No | No |
| E588H | −0.35 | 0.17 | −0.26 | 0.16 | NA | NA | Yes | No |
| E588L | −0.31 | 0.07 | −0.29 | 0.07 | 0.41 | 0.12 | Yes | No |
| E588K | 0.18 | 0.07 | 0.13 | 0.07 | −0.25 | 0.15 | Yes | No |
| E588M | −0.50 | 0.12 | −0.10 | 0.11 | 0.54 | 0.12 | Yes | No |
| E588F | −0.23 | 0.15 | 0.13 | 0.14 | NA | NA | Yes | No |
| E588P | −0.04 | 0.10 | 0.06 | 0.09 | 0.52 | 0.19 | Yes | No |
| E588S | −0.03 | 0.07 | −0.34 | 0.08 | −0.47 | 0.08 | No | No |
| E588* | −1.05 | 0.11 | −1.06 | 0.11 | −1.02 | 0.15 | No | No |
| E588T | 0.32 | 0.09 | −1.53 | 0.15 | NA | NA | Yes | No |
| E588W | −0.02 | 0.07 | 0.03 | 0.07 | −0.01 | 0.19 | Yes | No |
| E588Y | −0.11 | 0.17 | 0.93 | 0.14 | NA | NA | Yes | No |
| E588V | −0.70 | 0.06 | −0.19 | 0.05 | 0.07 | 0.08 | Yes | No |
| G589A | −0.44 | 0.05 | −0.09 | 0.04 | −0.52 | 0.14 | No | No |
| G589R | −0.21 | 0.04 | −0.73 | 0.04 | −0.69 | 0.07 | No | No |
| G589D | −0.29 | 0.08 | −0.88 | 0.10 | −0.70 | 0.17 | No | No |
| G589C | −0.14 | 0.04 | −0.12 | 0.04 | −0.59 | 0.07 | No | No |
| G589Q | NA | NA | NA | NA | −0.13 | 0.27 | Yes | No |
| G589E | −0.39 | 0.06 | −1.47 | 0.08 | −0.59 | 0.24 | No | No |
| G589L | 0.07 | 0.06 | −1.02 | 0.08 | −1.07 | 0.20 | Yes | No |
| G589M | −0.45 | 0.12 | −1.01 | 0.14 | NA | NA | Yes | No |
| G589P | −0.34 | 0.08 | −2.17 | 0.15 | −1.08 | 0.12 | No | No |
| G589S | −0.13 | 0.04 | −0.30 | 0.04 | −0.54 | 0.10 | No | No |
| G589T | −0.52 | 0.11 | −0.51 | 0.10 | −1.12 | 0.28 | No | No |
| G589W | −0.62 | 0.06 | −0.77 | 0.07 | −0.26 | 0.13 | No | No |
| G589Y | NA | NA | NA | NA | −0.01 | 0.41 | Yes | No |
| G589V | −0.65 | 0.05 | −0.97 | 0.06 | −0.22 | 0.13 | No | No |
| F590A | −0.43 | 0.05 | −1.38 | 0.07 | −1.07 | 0.15 | No | No |
| F590R | −0.22 | 0.05 | −0.83 | 0.05 | −0.62 | 0.15 | No | No |
| F590N | −0.95 | 0.17 | −0.65 | 0.15 | NA | NA | Yes | No |
| F590C | −0.49 | 0.08 | −0.73 | 0.08 | −1.06 | 0.20 | No | No |
| F590E | −1.00 | 0.09 | −1.26 | 0.10 | −0.44 | 0.26 | No | No |
| F590G | −1.05 | 0.04 | −1.44 | 0.05 | −1.47 | 0.09 | No | No |
| F590I | 0.01 | 0.09 | 0.10 | 0.08 | NA | NA | Yes | No |
| F590L | −0.02 | 0.04 | −0.21 | 0.04 | −0.51 | 0.06 | No | No |
| F590M | −0.27 | 0.12 | −0.41 | 0.12 | NA | NA | Yes | No |
| F590P | −1.08 | 0.10 | −1.31 | 0.10 | −1.37 | 0.17 | No | No |
| F590S | −0.03 | 0.05 | −0.29 | 0.05 | −0.61 | 0.07 | No | No |
| F590T | −1.50 | 0.15 | −1.08 | 0.12 | NA | NA | Yes | No |
| F590W | 0.04 | 0.07 | −0.11 | 0.07 | −0.87 | 0.26 | Yes | No |
| F590Y | 0.07 | 0.06 | −0.18 | 0.07 | −0.19 | 0.17 | Yes | No |
| F590V | −1.03 | 0.06 | −0.97 | 0.06 | −0.98 | 0.14 | No | No |
| D591A | 0.20 | 0.04 | 0.07 | 0.04 | −0.54 | 0.05 | Yes | No |
| D591R | −0.94 | 0.05 | −1.06 | 0.05 | −0.45 | 0.13 | No | No |
| D591N | −0.49 | 0.10 | −0.61 | 0.10 | −0.54 | 0.14 | No | No |
| D591C | −0.66 | 0.10 | −0.68 | 0.09 | −0.47 | 0.23 | No | No |
| D591Q | −0.34 | 0.10 | 0.11 | 0.09 | −0.15 | 0.38 | Yes | No |
| D591E | −0.43 | 0.05 | −0.39 | 0.05 | −0.84 | 0.14 | No | No |
| D591G | −0.62 | 0.03 | −0.81 | 0.03 | −0.59 | 0.03 | No | No |
| D591H | −1.19 | 0.16 | −0.84 | 0.14 | NA | NA | Yes | No |
| D591L | −0.17 | 0.06 | −0.59 | 0.07 | −0.99 | 0.20 | No | No |
| D591K | −0.51 | 0.12 | −0.27 | 0.11 | NA | NA | Yes | No |
| D591M | −0.90 | 0.12 | −0.93 | 0.12 | −0.36 | 0.27 | No | No |
| D591S | −0.69 | 0.07 | −1.41 | 0.09 | −0.67 | 0.17 | No | No |
| D591T | −0.15 | 0.08 | −0.93 | 0.10 | −1.04 | 0.23 | No | No |
| D591W | −1.02 | 0.08 | −0.91 | 0.07 | −0.42 | 0.16 | No | No |
| D591Y | 0.08 | 0.10 | −0.62 | 0.12 | −0.50 | 0.17 | Yes | No |
| D591V | −0.76 | 0.05 | −1.11 | 0.05 | −1.12 | 0.11 | No | No |
| K592A | −1.60 | 0.09 | −0.60 | 0.06 | −1.42 | 0.15 | No | No |
| K592R | −0.98 | 0.05 | −0.77 | 0.04 | −1.03 | 0.05 | No | No |
| K592N | −0.12 | 0.10 | 0.07 | 0.10 | −0.91 | 0.19 | Yes | No |
| K592Q | −0.52 | 0.07 | −0.77 | 0.08 | −0.30 | 0.10 | No | No |
| K592E | −0.52 | 0.07 | −0.76 | 0.07 | −1.22 | 0.10 | No | No |
| K592G | −1.76 | 0.06 | −1.45 | 0.05 | −1.64 | 0.08 | No | No |
| K592L | −1.72 | 0.08 | −1.52 | 0.08 | −1.24 | 0.13 | No | No |
| K592M | −0.70 | 0.07 | −0.58 | 0.07 | −0.68 | 0.07 | No | No |
| K592P | −1.70 | 0.14 | −1.63 | 0.13 | NA | NA | Yes | No |
| K592S | −1.67 | 0.10 | −1.56 | 0.10 | NA | NA | Yes | No |
| K592* | 0.00 | 0.08 | −1.63 | 0.13 | −0.91 | 0.18 | Yes | No |
| K592T | −1.38 | 0.11 | −0.98 | 0.09 | NA | NA | Yes | No |
| K592W | −1.60 | 0.10 | −1.14 | 0.08 | −0.21 | 0.20 | No | No |
| K592V | −1.60 | 0.06 | −1.14 | 0.05 | −1.90 | 0.08 | No | No |
| M593A | −1.94 | 0.07 | −1.00 | 0.05 | −1.73 | 0.06 | No | No |
| M593R | −0.79 | 0.03 | −0.81 | 0.03 | −0.81 | 0.03 | No | No |
| M593N | −1.58 | 0.13 | −1.89 | 0.15 | NA | NA | Yes | No |
| M593D | −2.12 | 0.13 | −1.32 | 0.09 | −1.77 | 0.18 | No | No |
| M593C | −0.95 | 0.07 | −0.04 | 0.06 | −1.27 | 0.10 | No | No |
| M593Q | NA | NA | NA | NA | −0.83 | 0.19 | Yes | No |
| M593E | −2.30 | 0.10 | −2.14 | 0.09 | −1.55 | 0.14 | No | No |
| M593G | −1.83 | 0.04 | −1.88 | 0.04 | −1.09 | 0.07 | No | No |
| M593I | −0.83 | 0.07 | −1.05 | 0.08 | −1.17 | 0.12 | No | No |
| M593L | −0.10 | 0.03 | −0.33 | 0.03 | −0.52 | 0.06 | No | No |
| M593K | −1.64 | 0.09 | −1.56 | 0.08 | −1.09 | 0.05 | No | No |
| M593F | −1.98 | 0.12 | −0.83 | 0.08 | −1.61 | 0.12 | No | No |
| M593P | −1.56 | 0.10 | −2.23 | 0.12 | −0.38 | 0.12 | No | No |
| M593S | −1.58 | 0.06 | −1.88 | 0.07 | −1.33 | 0.11 | No | No |
| M593* | −2.27 | 0.12 | −2.28 | 0.12 | −1.55 | 0.18 | No | No |
| M593T | −1.01 | 0.06 | −0.79 | 0.05 | −0.64 | 0.10 | No | No |
| M593W | −0.92 | 0.05 | −1.57 | 0.07 | −2.41 | 0.16 | No | No |
| M593V | −0.56 | 0.03 | −1.41 | 0.04 | −1.07 | 0.07 | No | No |
| Y594A | −0.40 | 0.04 | −1.29 | 0.05 | −1.34 | 0.10 | No | No |
| Y594R | −0.02 | 0.03 | −0.18 | 0.03 | −1.14 | 0.08 | No | No |
| Y594N | −1.08 | 0.10 | −0.80 | 0.08 | −0.62 | 0.15 | No | No |
| Y594D | −1.17 | 0.07 | −1.36 | 0.07 | −1.43 | 0.13 | No | No |
| Y594C | −0.47 | 0.06 | −0.08 | 0.06 | −1.45 | 0.10 | No | No |
| Y594Q | −1.06 | 0.08 | −0.26 | 0.06 | −1.14 | 0.12 | No | No |
| Y594E | −0.42 | 0.04 | −0.82 | 0.05 | −2.58 | 0.11 | No | No |
| Y594G | −1.21 | 0.03 | −1.58 | 0.03 | −1.51 | 0.04 | No | No |
| Y594H | 0.04 | 0.07 | −0.11 | 0.07 | −0.42 | 0.12 | Yes | No |
| Y594I | −0.73 | 0.10 | −0.78 | 0.10 | −0.74 | 0.27 | No | No |
| Y594L | −0.88 | 0.05 | −0.67 | 0.04 | −1.45 | 0.10 | No | No |
| Y594K | −0.40 | 0.06 | −0.88 | 0.07 | −1.41 | 0.17 | No | No |
| Y594M | 0.05 | 0.06 | −0.76 | 0.07 | −1.47 | 0.18 | Yes | No |
| Y594F | −0.18 | 0.07 | −0.07 | 0.06 | −0.45 | 0.14 | No | No |
| Y594S | −1.00 | 0.05 | −0.88 | 0.05 | −1.40 | 0.06 | No | No |
| Y594* | −1.41 | 0.08 | −0.73 | 0.06 | −1.67 | 0.13 | No | No |
| Y594T | −1.66 | 0.09 | −1.71 | 0.09 | −1.37 | 0.15 | No | No |
| Y594W | −0.33 | 0.04 | −0.93 | 0.05 | −1.06 | 0.10 | No | No |
| Y594V | −0.40 | 0.04 | −0.47 | 0.04 | −0.96 | 0.08 | No | No |
| Y595A | −1.63 | 0.05 | −1.08 | 0.04 | −2.32 | 0.10 | No | No |
| Y595R | −1.29 | 0.04 | −1.66 | 0.05 | −2.00 | 0.06 | No | No |
| Y595N | −1.61 | 0.14 | −0.78 | 0.10 | −0.80 | 0.19 | No | No |
| Y595D | −1.27 | 0.09 | −1.50 | 0.09 | −1.84 | 0.06 | No | No |
| Y595C | −0.14 | 0.05 | −0.50 | 0.05 | −1.06 | 0.11 | No | No |
| Y595Q | −1.71 | 0.10 | −1.18 | 0.08 | −1.13 | 0.22 | No | No |
| Y595E | −2.05 | 0.08 | −2.21 | 0.08 | −2.32 | 0.03 | No | No |
| Y595G | −1.67 | 0.03 | −1.31 | 0.03 | −1.77 | 0.03 | No | No |
| Y595H | −0.86 | 0.09 | −0.57 | 0.08 | −0.77 | 0.13 | No | No |
| Y595I | −1.20 | 0.14 | −1.49 | 0.15 | NA | NA | Yes | No |
| Y595L | −0.09 | 0.04 | 0.08 | 0.04 | −0.83 | 0.12 | Yes | No |
| Y595K | −1.17 | 0.09 | −1.74 | 0.11 | NA | NA | Yes | No |
| Y595M | 0.24 | 0.06 | −0.10 | 0.07 | −0.34 | 0.19 | Yes | No |
| Y595F | −1.21 | 0.09 | −0.70 | 0.08 | −1.09 | 0.14 | No | No |
| Y595S | −1.31 | 0.05 | −1.19 | 0.05 | −1.64 | 0.09 | No | No |
| Y595* | −1.32 | 0.07 | −1.52 | 0.08 | −1.60 | 0.09 | No | No |
| Y595T | −0.27 | 0.05 | −0.81 | 0.06 | NA | NA | Yes | No |
| Y595W | −1.72 | 0.06 | −1.71 | 0.06 | −1.97 | 0.10 | No | No |
| Y595V | −0.32 | 0.03 | −0.74 | 0.04 | −2.00 | 0.06 | No | No |
| D596E | 0.04 | 0.04 | 0.24 | 0.04 | 0.69 | 0.05 | Yes | Yes |
| D596A | 0.07 | 0.03 | −0.18 | 0.04 | −0.99 | 0.09 | Yes | No |
| D596R | 0.01 | 0.03 | 0.07 | 0.03 | −0.20 | 0.04 | Yes | No |
| D596N | −0.12 | 0.08 | 0.29 | 0.08 | 0.39 | 0.15 | Yes | No |
| D596C | −0.01 | 0.07 | −0.24 | 0.07 | −0.55 | 0.06 | No | No |
| D596Q | −0.04 | 0.09 | 0.42 | 0.08 | 0.46 | 0.31 | Yes | No |
| D596G | −0.23 | 0.02 | −0.22 | 0.02 | −1.16 | 0.05 | No | No |
| D596H | 0.24 | 0.10 | −0.18 | 0.11 | 0.16 | 0.26 | Yes | No |
| D596L | −0.92 | 0.07 | −0.10 | 0.05 | −0.75 | 0.18 | No | No |
| D596K | 0.01 | 0.08 | 0.36 | 0.07 | −0.07 | 0.19 | Yes | No |
| D596M | 0.26 | 0.08 | 0.29 | 0.07 | −0.27 | 0.28 | Yes | No |
| D596F | 0.03 | 0.11 | −0.55 | 0.13 | 0.09 | 0.13 | Yes | No |
| D596P | NA | NA | NA | NA | −0.56 | 0.24 | Yes | No |
| D596S | −0.58 | 0.06 | −0.29 | 0.05 | 0.37 | 0.07 | Yes | No |
| D596* | −0.99 | 0.11 | −1.29 | 0.12 | NA | NA | Yes | No |
| D596T | −1.56 | 0.12 | 0.65 | 0.06 | −1.10 | 0.23 | Yes | No |
| D596W | −0.19 | 0.05 | 0.12 | 0.05 | −1.34 | 0.11 | Yes | No |
| D596Y | −0.55 | 0.09 | −0.32 | 0.08 | −0.27 | 0.16 | No | No |
| D596V | −0.06 | 0.03 | −0.22 | 0.03 | −1.39 | 0.08 | No | No |
| Y597A | −2.00 | 0.06 | −1.33 | 0.05 | −2.10 | 0.12 | No | No |
| Y597R | −2.18 | 0.05 | −2.13 | 0.05 | −2.18 | 0.04 | No | No |
| Y597N | −1.28 | 0.11 | −0.66 | 0.09 | −1.35 | 0.13 | No | No |
| Y597D | −0.30 | 0.03 | −0.28 | 0.03 | −0.34 | 0.04 | No | No |
| Y597C | −0.79 | 0.06 | −1.14 | 0.07 | −1.47 | 0.05 | No | No |
| Y597E | −2.33 | 0.09 | −2.41 | 0.09 | NA | NA | Yes | No |
| Y597G | −1.89 | 0.04 | −2.15 | 0.04 | −1.96 | 0.05 | No | No |
| Y597H | −0.45 | 0.07 | −0.25 | 0.06 | −0.71 | 0.10 | No | No |
| Y597I | −0.51 | 0.11 | −1.26 | 0.13 | NA | NA | Yes | No |
| Y597L | 0.24 | 0.04 | 0.32 | 0.04 | −0.31 | 0.09 | Yes | No |
| Y597M | −0.11 | 0.07 | −1.15 | 0.10 | NA | NA | Yes | No |
| Y597F | −0.08 | 0.07 | −0.16 | 0.07 | 0.56 | 0.06 | Yes | No |
| Y597P | −2.03 | 0.11 | −2.30 | 0.11 | NA | NA | Yes | No |
| Y597S | −1.25 | 0.05 | −1.04 | 0.05 | −2.00 | 0.09 | No | No |
| Y597* | −0.94 | 0.06 | −0.96 | 0.06 | −2.02 | 0.13 | No | No |
| Y597T | −1.78 | 0.09 | −2.62 | 0.12 | −1.94 | 0.04 | No | No |
| Y597W | −1.16 | 0.05 | −1.33 | 0.05 | −2.30 | 0.08 | No | No |
| Y597V | −1.95 | 0.07 | −1.63 | 0.06 | −2.69 | 0.08 | No | No |
| F598A | −1.68 | 0.07 | −1.98 | 0.08 | −2.09 | 0.12 | No | No |
| F598R | −1.81 | 0.06 | −2.21 | 0.07 | −1.57 | 0.11 | No | No |
| F598C | −1.96 | 0.12 | −2.25 | 0.13 | −1.21 | 0.15 | No | No |
| F598G | −2.06 | 0.05 | −1.79 | 0.04 | −0.96 | 0.03 | No | No |
| F598I | −0.32 | 0.09 | −0.44 | 0.09 | −0.75 | 0.12 | No | No |
| F598L | −0.25 | 0.04 | −0.09 | 0.04 | −0.65 | 0.04 | No | No |
| F598M | −0.35 | 0.09 | −0.55 | 0.09 | −0.87 | 0.27 | No | No |
| F598P | NA | NA | NA | NA | −1.93 | 0.07 | Yes | No |
| F598S | −1.12 | 0.06 | −1.33 | 0.06 | −1.35 | 0.08 | No | No |
| F598W | −1.23 | 0.06 | −0.34 | 0.05 | −1.74 | 0.12 | No | No |
| F598Y | −0.52 | 0.09 | −0.44 | 0.09 | −0.60 | 0.15 | No | No |
| F598V | −1.37 | 0.06 | −1.39 | 0.05 | −2.25 | 0.09 | No | No |
| P599G | 0.84 | 0.04 | 0.83 | 0.04 | 1.01 | 0.05 | Yes | Yes |
| P599A | −1.03 | 0.07 | −0.85 | 0.06 | −1.42 | 0.11 | No | No |
| P599R | −1.89 | 0.09 | −1.20 | 0.06 | −2.08 | 0.14 | No | No |
| P599N | −0.66 | 0.16 | −0.33 | 0.14 | NA | NA | Yes | No |
| P599E | −2.04 | 0.15 | −2.07 | 0.15 | NA | NA | Yes | No |
| P599H | −1.01 | 0.14 | −0.99 | 0.14 | NA | NA | Yes | No |
| P599L | −1.56 | 0.09 | −1.36 | 0.08 | −1.46 | 0.11 | No | No |
| P599S | −0.09 | 0.03 | −0.10 | 0.03 | −0.56 | 0.04 | No | No |
| P599* | −1.14 | 0.13 | −1.42 | 0.14 | NA | NA | Yes | No |
| P599T | −0.42 | 0.07 | −0.95 | 0.08 | −1.37 | 0.14 | No | No |
| P599V | −1.88 | 0.12 | −1.85 | 0.11 | −1.81 | 0.14 | No | No |
| D600A | 0.43 | 0.06 | −0.31 | 0.07 | 0.68 | 0.14 | Yes | No |
| D600R | −0.88 | 0.07 | −0.40 | 0.06 | −1.67 | 0.19 | No | No |
| D600N | −0.03 | 0.07 | −0.16 | 0.07 | 0.67 | 0.14 | Yes | No |
| D600C | NA | NA | NA | NA | −0.32 | 0.48 | Yes | No |
| D600Q | −0.37 | 0.15 | −0.01 | 0.13 | NA | NA | Yes | No |
| D600E | −0.44 | 0.07 | −0.46 | 0.07 | −0.95 | 0.22 | No | No |
| D600G | −0.19 | 0.04 | −0.33 | 0.04 | 1.07 | 0.05 | Yes | No |
| D600H | −0.08 | 0.13 | −0.54 | 0.14 | NA | NA | Yes | No |
| D600L | −1.26 | 0.13 | −1.19 | 0.12 | −0.50 | 0.29 | No | No |
| D600P | −0.14 | 0.11 | −1.46 | 0.16 | 0.47 | 0.45 | Yes | No |
| D600S | 0.86 | 0.07 | −0.03 | 0.08 | 0.74 | 0.14 | Yes | No |
| D600T | −1.42 | 0.15 | −0.70 | 0.12 | 0.43 | 0.29 | Yes | No |
| D600W | −0.67 | 0.11 | −0.51 | 0.10 | NA | NA | Yes | No |
| D600Y | −0.29 | 0.13 | −0.19 | 0.12 | NA | NA | Yes | No |
| D600V | −0.05 | 0.06 | −0.23 | 0.06 | −0.56 | 0.13 | No | No |
| A601R | −1.65 | 0.07 | −1.62 | 0.07 | NA | NA | Yes | No |
| A601D | −1.38 | 0.13 | −1.10 | 0.11 | NA | NA | Yes | No |
| A601C | 0.26 | 0.08 | 0.26 | 0.08 | −0.25 | 0.24 | Yes | No |
| A601G | −1.05 | 0.04 | −0.63 | 0.04 | −1.44 | 0.04 | No | No |
| A601L | −2.16 | 0.13 | −1.44 | 0.09 | NA | NA | Yes | No |
| A601P | −1.40 | 0.13 | −1.20 | 0.11 | NA | NA | Yes | No |
| A601S | −0.60 | 0.06 | 0.23 | 0.04 | −0.52 | 0.08 | Yes | No |
| A601T | −0.84 | 0.08 | −0.53 | 0.07 | −0.99 | 0.12 | No | No |
| A601W | −1.89 | 0.12 | −1.84 | 0.11 | NA | NA | Yes | No |
| A601V | −0.48 | 0.05 | −0.23 | 0.04 | −0.77 | 0.06 | No | No |
| A602C | 0.64 | 0.09 | 0.61 | 0.09 | 0.73 | 0.28 | Yes | Yes |
| A602R | −0.59 | 0.07 | −0.97 | 0.08 | NA | NA | Yes | No |
| A602D | 0.04 | 0.04 | −0.09 | 0.04 | −0.40 | 0.05 | Yes | No |
| A602G | −0.52 | 0.05 | −0.56 | 0.05 | −1.62 | 0.06 | No | No |
| A602H | NA | NA | NA | NA | 0.37 | 0.35 | Yes | No |
| A602L | −1.97 | 0.14 | −1.06 | 0.10 | NA | NA | Yes | No |
| A602P | −0.80 | 0.09 | −0.42 | 0.08 | −0.71 | 0.15 | No | No |
| A602S | −0.38 | 0.07 | −0.14 | 0.06 | −0.73 | 0.16 | No | No |
| A602T | −0.28 | 0.06 | −0.03 | 0.06 | −0.51 | 0.11 | No | No |
| A602W | NA | NA | NA | NA | −0.89 | 0.37 | Yes | No |
| A602V | −0.77 | 0.06 | −0.66 | 0.05 | −1.41 | 0.10 | No | No |
| K603A | −1.34 | 0.07 | −1.59 | 0.07 | −1.76 | 0.05 | No | No |
| K603R | −0.56 | 0.04 | −0.37 | 0.03 | −0.46 | 0.04 | No | No |
| K603N | −1.59 | 0.16 | −1.11 | 0.13 | NA | NA | Yes | No |
| K603C | −1.03 | 0.10 | −1.23 | 0.10 | NA | NA | Yes | No |
| K603Q | −1.30 | 0.11 | −1.57 | 0.12 | NA | NA | Yes | No |
| K603E | −1.40 | 0.07 | −0.68 | 0.05 | −1.60 | 0.10 | No | No |
| K603G | −1.88 | 0.05 | −1.70 | 0.04 | −1.97 | 0.08 | No | No |
| K603H | NA | NA | NA | NA | −0.51 | 0.41 | Yes | No |
| K603L | −0.77 | 0.06 | −0.60 | 0.06 | −1.63 | 0.14 | No | No |
| K603M | 0.00 | 0.06 | −0.57 | 0.07 | −1.02 | 0.11 | No | No |
| K603P | −1.70 | 0.12 | −1.06 | 0.09 | NA | NA | Yes | No |
| K603S | NA | NA | NA | NA | −2.06 | 0.05 | Yes | No |
| K603* | −1.20 | 0.09 | −1.66 | 0.11 | −1.37 | 0.16 | No | No |
| K603T | −1.11 | 0.08 | −1.15 | 0.08 | −1.13 | 0.13 | No | No |
| K603W | −2.79 | 0.14 | −1.74 | 0.09 | −1.45 | 0.14 | No | No |
| K603V | −1.72 | 0.07 | −1.54 | 0.06 | −2.40 | 0.07 | No | No |
| M604A | −2.19 | 0.15 | −1.92 | 0.13 | NA | NA | Yes | No |
| M604R | −0.96 | 0.06 | −1.76 | 0.08 | −2.02 | 0.13 | No | No |
| M604G | −2.12 | 0.08 | −0.82 | 0.05 | −1.81 | 0.12 | No | No |
| M604I | −0.58 | 0.10 | −0.71 | 0.10 | −0.51 | 0.15 | No | No |
| M604L | −0.74 | 0.06 | −0.50 | 0.06 | −0.25 | 0.06 | No | No |
| M604K | −1.08 | 0.15 | −0.78 | 0.13 | NA | NA | Yes | No |
| M604T | −0.14 | 0.06 | 0.01 | 0.06 | −0.44 | 0.09 | Yes | No |
| M604W | −1.97 | 0.14 | −2.03 | 0.14 | NA | NA | Yes | No |
| M604V | −1.38 | 0.08 | −1.32 | 0.07 | −1.38 | 0.09 | No | No |
| I605A | −1.32 | 0.09 | −1.04 | 0.08 | NA | NA | Yes | No |
| I605R | −2.07 | 0.09 | −2.36 | 0.10 | −2.12 | 0.15 | No | No |
| I605N | −0.93 | 0.10 | −0.19 | 0.08 | −0.76 | 0.16 | No | No |
| I605C | 0.20 | 0.09 | −0.98 | 0.13 | NA | NA | Yes | No |
| I605G | −1.69 | 0.07 | −1.41 | 0.06 | −2.04 | 0.14 | No | No |
| I605L | −0.93 | 0.07 | −0.25 | 0.06 | −1.49 | 0.14 | No | No |
| I605M | −1.09 | 0.09 | −0.86 | 0.08 | −1.44 | 0.15 | No | No |
| I605F | −0.50 | 0.11 | −0.52 | 0.10 | NA | NA | Yes | No |
| I605S | −1.91 | 0.11 | −1.82 | 0.10 | −1.55 | 0.10 | No | No |
| I605T | −0.45 | 0.07 | −0.67 | 0.07 | −1.09 | 0.12 | No | No |
| I605V | 0.13 | 0.05 | −0.04 | 0.05 | −0.33 | 0.11 | Yes | No |
| I605A | −1.42 | 0.10 | −0.82 | 0.08 | NA | NA | Yes | No |
| I605R | −2.12 | 0.09 | −2.15 | 0.10 | −1.82 | 0.16 | No | No |
| I605N | 0.04 | 0.06 | 0.36 | 0.06 | −0.41 | 0.09 | Yes | No |
| I605D | −1.00 | 0.09 | −0.60 | 0.08 | −0.72 | 0.14 | No | No |
| I605C | 0.10 | 0.10 | −0.82 | 0.13 | NA | NA | Yes | No |
| I605G | −1.69 | 0.07 | −1.23 | 0.06 | −1.96 | 0.13 | No | No |
| I605L | −0.10 | 0.03 | 0.14 | 0.03 | −1.00 | 0.08 | Yes | No |
| I605M | −0.89 | 0.09 | −0.63 | 0.08 | −1.25 | 0.21 | No | No |
| I605F | −0.55 | 0.10 | −0.33 | 0.09 | NA | NA | Yes | No |
| I605S | −0.22 | 0.04 | 0.10 | 0.04 | −1.29 | 0.08 | Yes | No |
| I605T | −0.02 | 0.04 | 0.21 | 0.04 | −0.53 | 0.07 | Yes | No |
| I605V | 0.19 | 0.05 | 0.25 | 0.05 | −0.06 | 0.10 | Yes | No |
| P606A | −1.59 | 0.10 | −2.27 | 0.12 | −1.25 | 0.17 | No | No |
| P606R | −1.77 | 0.08 | −2.62 | 0.12 | −1.94 | 0.15 | No | No |
| P606G | −1.63 | 0.07 | −2.12 | 0.08 | −1.89 | 0.14 | No | No |
| P606H | −0.89 | 0.13 | −0.93 | 0.13 | NA | NA | Yes | No |
| P606L | −0.77 | 0.07 | −1.12 | 0.08 | −1.30 | 0.15 | No | No |
| P606S | −1.42 | 0.10 | −1.22 | 0.09 | −1.16 | 0.14 | No | No |
| P606T | −0.06 | 0.06 | −0.63 | 0.07 | −0.40 | 0.08 | No | No |
| P606W | −0.88 | 0.11 | −1.05 | 0.11 | NA | NA | Yes | No |
| P606V | NA | NA | NA | NA | −1.59 | 0.24 | Yes | No |
| P606A | −1.59 | 0.10 | −2.27 | 0.14 | −1.33 | 0.19 | No | No |
| P606R | −1.77 | 0.09 | −1.59 | 0.08 | −1.76 | 0.15 | No | No |
| P606Q | NA | NA | NA | NA | −0.43 | 0.12 | Yes | No |
| P606G | −1.73 | 0.08 | −2.00 | 0.09 | −1.79 | 0.16 | No | No |
| P606H | 0.13 | 0.07 | 0.17 | 0.07 | −0.14 | 0.04 | Yes | No |
| P606L | −0.98 | 0.08 | −1.23 | 0.09 | −1.00 | 0.16 | No | No |
| P606S | −1.64 | 0.12 | −1.35 | 0.11 | −1.37 | 0.17 | No | No |
| P606T | −0.10 | 0.07 | −0.63 | 0.08 | −0.65 | 0.11 | No | No |
| P606W | −1.06 | 0.12 | −0.93 | 0.11 | NA | NA | Yes | No |
| P606V | NA | NA | NA | NA | −1.33 | 0.27 | Yes | No |
| K607A | −1.61 | 0.05 | −1.70 | 0.06 | −2.05 | 0.10 | No | No |
| K607R | −1.65 | 0.04 | −1.32 | 0.03 | −2.05 | 0.03 | No | No |
| K607N | −0.51 | 0.07 | −0.19 | 0.07 | NA | NA | Yes | No |
| K607D | −2.48 | 0.14 | −1.83 | 0.11 | NA | NA | Yes | No |
| K607C | −1.09 | 0.07 | −1.20 | 0.08 | NA | NA | Yes | No |
| K607Q | −1.77 | 0.09 | −1.64 | 0.09 | −1.87 | 0.13 | No | No |
| K607E | −1.93 | 0.06 | −1.40 | 0.05 | −1.61 | 0.07 | No | No |
| K607G | −1.81 | 0.03 | −1.60 | 0.03 | −1.79 | 0.03 | No | No |
| K607H | −1.16 | 0.12 | −0.39 | 0.10 | NA | NA | Yes | No |
| K607L | −1.08 | 0.05 | −1.66 | 0.06 | −1.63 | 0.08 | No | No |
| K607M | −0.42 | 0.06 | −1.47 | 0.08 | −0.97 | 0.05 | No | No |
| K607F | −1.55 | 0.12 | −1.20 | 0.11 | NA | NA | Yes | No |
| K607P | NA | NA | NA | NA | −1.84 | 0.14 | Yes | No |
| K607S | −1.89 | 0.06 | −1.43 | 0.06 | −1.53 | 0.04 | No | No |
| K607* | −1.44 | 0.07 | −0.97 | 0.06 | −1.20 | 0.14 | No | No |
| K607T | −2.23 | 0.09 | −1.26 | 0.06 | −1.98 | 0.11 | No | No |
| K607W | −1.92 | 0.06 | −1.88 | 0.06 | −1.81 | 0.10 | No | No |
| K607V | −1.80 | 0.05 | −1.85 | 0.06 | −1.86 | 0.03 | No | No |
| C608A | −1.60 | 0.09 | −1.32 | 0.08 | −1.81 | 0.15 | No | No |
| C608R | −0.90 | 0.04 | −0.72 | 0.04 | −1.23 | 0.09 | No | No |
| C608E | −1.06 | 0.09 | −1.27 | 0.10 | NA | NA | Yes | No |
| C608G | −1.44 | 0.05 | −0.58 | 0.04 | −1.66 | 0.09 | No | No |
| C608L | −1.11 | 0.08 | −0.49 | 0.07 | NA | NA | Yes | No |
| C608F | −1.13 | 0.12 | −0.91 | 0.12 | NA | NA | Yes | No |
| C608P | −1.62 | 0.14 | −1.13 | 0.12 | NA | NA | Yes | No |
| C608S | −0.62 | 0.05 | −0.49 | 0.05 | −1.56 | 0.12 | No | No |
| C608* | −1.61 | 0.13 | −0.66 | 0.10 | NA | NA | Yes | No |
| C608W | −1.58 | 0.09 | −1.31 | 0.08 | NA | NA | Yes | No |
| C608Y | −0.27 | 0.06 | −0.09 | 0.06 | −0.65 | 0.15 | No | No |
| C608V | −1.32 | 0.07 | −2.23 | 0.11 | NA | NA | Yes | No |
| S609A | 0.10 | 0.07 | 0.21 | 0.07 | −0.16 | 0.22 | Yes | No |
| S609R | −0.60 | 0.05 | −0.45 | 0.05 | −1.32 | 0.06 | No | No |
| S609N | −1.18 | 0.12 | −0.49 | 0.10 | NA | NA | Yes | No |
| S609C | −0.69 | 0.12 | 0.21 | 0.09 | −0.27 | 0.25 | Yes | No |
| S609G | 0.00 | 0.04 | −0.27 | 0.04 | −0.17 | 0.10 | No | No |
| S609I | −0.16 | 0.12 | 0.43 | 0.11 | NA | NA | Yes | No |
| S609T | −0.76 | 0.12 | 0.55 | 0.09 | NA | NA | Yes | No |
| S609W | −1.36 | 0.13 | −0.51 | 0.10 | NA | NA | Yes | No |
| T610A | −0.40 | 0.05 | −0.40 | 0.05 | −0.93 | 0.09 | No | No |
| T610R | −1.61 | 0.07 | −0.98 | 0.06 | −1.76 | 0.15 | No | No |
| T610N | −0.27 | 0.10 | −0.20 | 0.10 | −0.58 | 0.12 | No | No |
| T610C | −0.26 | 0.09 | −0.31 | 0.09 | NA | NA | Yes | No |
| T610Q | NA | NA | NA | NA | −0.53 | 0.36 | Yes | No |
| T610G | −1.36 | 0.05 | −1.25 | 0.05 | −1.62 | 0.12 | No | No |
| T610I | −0.82 | 0.11 | −0.98 | 0.12 | NA | NA | Yes | No |
| T610L | −1.78 | 0.11 | −2.29 | 0.14 | NA | NA | Yes | No |
| T610P | 0.07 | 0.04 | 0.33 | 0.04 | −0.62 | 0.08 | Yes | No |
| T610S | −0.35 | 0.06 | −0.62 | 0.06 | −0.53 | 0.07 | No | No |
| T610V | 0.26 | 0.05 | −1.14 | 0.08 | −1.58 | 0.17 | Yes | No |
| Q611A | −2.61 | 0.13 | −1.23 | 0.08 | −1.40 | 0.13 | No | No |
| Q611R | −0.68 | 0.04 | −0.69 | 0.04 | −1.33 | 0.04 | No | No |
| Q611E | −1.22 | 0.07 | −0.58 | 0.06 | −1.18 | 0.11 | No | No |
| Q611G | −1.38 | 0.05 | −1.84 | 0.06 | −1.82 | 0.08 | No | No |
| Q611H | 0.04 | 0.07 | −0.20 | 0.07 | −0.91 | 0.13 | Yes | No |
| Q611L | −1.21 | 0.08 | −1.74 | 0.10 | −1.67 | 0.16 | No | No |
| Q611K | −0.93 | 0.09 | −0.83 | 0.09 | −1.38 | 0.16 | No | No |
| Q611P | 0.13 | 0.06 | −0.14 | 0.06 | −0.81 | 0.08 | Yes | No |
| Q611S | −2.07 | 0.11 | −0.89 | 0.07 | NA | NA | Yes | No |
| Q611* | −0.75 | 0.09 | −1.11 | 0.10 | −1.17 | 0.16 | No | No |
| Q611W | −1.28 | 0.08 | −0.88 | 0.07 | NA | NA | Yes | No |
| Q611V | −1.42 | 0.07 | −1.15 | 0.07 | NA | NA | Yes | No |
| L612M | 0.70 | 0.07 | 0.70 | 0.07 | 0.01 | 0.03 | Yes | Yes |
| L612A | −1.32 | 0.11 | −1.11 | 0.11 | −0.98 | 0.22 | No | No |
| L612R | 0.03 | 0.05 | 0.16 | 0.05 | −0.58 | 0.11 | Yes | No |
| L612Q | −0.94 | 0.10 | −0.43 | 0.09 | NA | NA | Yes | No |
| L612E | −1.18 | 0.11 | −1.65 | 0.13 | NA | NA | Yes | No |
| L612G | −0.97 | 0.07 | −2.15 | 0.11 | −1.70 | 0.17 | No | No |
| L612I | −0.18 | 0.13 | 0.66 | 0.11 | −0.24 | 0.15 | Yes | No |
| L612K | −1.41 | 0.16 | −0.48 | 0.12 | NA | NA | Yes | No |
| L612P | −0.34 | 0.06 | −0.33 | 0.06 | −0.72 | 0.11 | No | No |
| L612* | −1.69 | 0.15 | −0.55 | 0.10 | NA | NA | Yes | No |
| L612T | −0.27 | 0.09 | −1.35 | 0.13 | NA | NA | Yes | No |
| L612V | −1.05 | 0.08 | −0.90 | 0.08 | −1.51 | 0.05 | No | No |
| K613R | −0.22 | 0.06 | −0.18 | 0.06 | −0.40 | 0.05 | No | No |
| K613N | 0.04 | 0.10 | 0.16 | 0.10 | NA | NA | Yes | No |
| K613Q | 0.14 | 0.04 | 0.38 | 0.04 | NA | NA | Yes | No |
| K613E | −0.75 | 0.08 | 0.06 | 0.07 | NA | NA | Yes | No |
| K613G | −1.17 | 0.08 | −1.36 | 0.09 | NA | NA | Yes | No |
| K613L | 0.12 | 0.09 | 0.49 | 0.09 | −0.52 | 0.26 | Yes | No |
| K613M | −0.26 | 0.11 | 0.73 | 0.09 | NA | NA | Yes | No |
| K613* | −0.72 | 0.11 | −0.72 | 0.11 | NA | NA | Yes | No |
| K613T | 0.26 | 0.05 | 0.46 | 0.05 | −0.65 | 0.08 | Yes | No |
| K613W | −1.27 | 0.12 | −1.60 | 0.14 | NA | NA | Yes | No |
| K613V | −0.89 | 0.10 | −0.25 | 0.08 | NA | NA | Yes | No |
| A614R | 0.28 | 0.04 | 0.07 | 0.05 | 0.16 | 0.05 | Yes | Yes |
| A614I | 0.52 | 0.11 | 0.59 | 0.11 | 0.41 | 0.22 | Yes | Yes |
| A614D | −0.02 | 0.08 | −0.34 | 0.09 | NA | NA | Yes | No |
| A614C | −0.54 | 0.09 | −0.12 | 0.08 | 0.02 | 0.22 | Yes | No |
| A614Q | 0.50 | 0.10 | 0.17 | 0.11 | NA | NA | Yes | No |
| A614E | −0.71 | 0.08 | −0.80 | 0.09 | NA | NA | Yes | No |
| A614G | −0.16 | 0.03 | 0.09 | 0.03 | −0.21 | 0.08 | Yes | No |
| A614L | 0.09 | 0.06 | −0.21 | 0.06 | 0.02 | 0.12 | Yes | No |
| A614K | NA | NA | NA | NA | 0.28 | 0.38 | Yes | No |
| A614M | −0.39 | 0.13 | 1.39 | 0.09 | NA | NA | Yes | No |
| A614F | −0.66 | 0.14 | −0.11 | 0.12 | NA | NA | Yes | No |
| A614P | −0.22 | 0.09 | −0.09 | 0.09 | −0.68 | 0.25 | No | No |
| A614S | −0.46 | 0.07 | 0.19 | 0.06 | −0.55 | 0.15 | Yes | No |
| A614* | NA | NA | NA | NA | −0.35 | 0.32 | Yes | No |
| A614T | 0.03 | 0.06 | 0.37 | 0.06 | −0.49 | 0.14 | Yes | No |
| A614W | −0.74 | 0.07 | −0.88 | 0.08 | −0.97 | 0.14 | No | No |
| A614V | 0.17 | 0.04 | 0.29 | 0.04 | −0.03 | 0.11 | Yes | No |
| V615A | −0.05 | 0.03 | 0.09 | 0.03 | −0.35 | 0.04 | Yes | No |
| V615R | −1.73 | 0.05 | −1.23 | 0.04 | −1.21 | 0.07 | No | No |
| V615N | −0.21 | 0.08 | −1.01 | 0.11 | −0.72 | 0.15 | No | No |
| V615D | −0.95 | 0.07 | −0.97 | 0.07 | −1.54 | 0.13 | No | No |
| V615C | −0.18 | 0.06 | −0.18 | 0.06 | −0.01 | 0.19 | No | No |
| V615Q | −1.87 | 0.10 | −1.41 | 0.09 | NA | NA | Yes | No |
| V615E | −0.82 | 0.04 | −0.59 | 0.04 | −1.03 | 0.05 | No | No |
| V615G | −0.57 | 0.03 | −0.88 | 0.03 | −1.19 | 0.04 | No | No |
| V615I | −0.51 | 0.09 | −0.73 | 0.10 | −0.67 | 0.23 | No | No |
| V615L | −0.07 | 0.03 | 0.05 | 0.03 | −0.88 | 0.05 | Yes | No |
| V615K | −1.22 | 0.08 | −1.81 | 0.10 | −1.56 | 0.07 | No | No |
| V615M | −0.52 | 0.06 | −0.54 | 0.06 | −0.54 | 0.12 | No | No |
| V615F | −1.88 | 0.14 | −1.30 | 0.12 | NA | NA | Yes | No |
| V615P | −1.53 | 0.10 | −1.82 | 0.11 | −1.42 | 0.06 | No | No |
| V615S | 0.17 | 0.04 | −0.23 | 0.04 | −0.63 | 0.05 | Yes | No |
| V615* | −1.04 | 0.07 | −0.78 | 0.07 | −1.35 | 0.16 | No | No |
| V615T | 0.19 | 0.05 | −0.12 | 0.06 | −0.07 | 0.17 | Yes | No |
| V615W | −1.19 | 0.06 | −1.55 | 0.07 | −1.90 | 0.05 | No | No |
| T616A | 0.32 | 0.03 | 0.24 | 0.04 | 0.09 | 0.05 | Yes | Yes |
| T616R | 0.19 | 0.03 | 0.12 | 0.03 | 0.62 | 0.04 | Yes | Yes |
| T616Q | 0.35 | 0.07 | 0.38 | 0.07 | 0.78 | 0.20 | Yes | Yes |
| T616G | 0.22 | 0.03 | 0.01 | 0.03 | 0.16 | 0.06 | Yes | Yes |
| T616Y | 0.54 | 0.09 | 0.64 | 0.09 | 0.05 | 0.38 | Yes | Yes |
| T616N | −0.11 | 0.08 | 0.20 | 0.08 | 0.16 | 0.07 | Yes | No |
| T616D | −0.66 | 0.08 | 0.14 | 0.07 | −0.18 | 0.26 | Yes | No |
| T616C | 0.54 | 0.06 | 0.27 | 0.06 | −0.24 | 0.11 | Yes | No |
| T616E | −0.28 | 0.06 | −0.38 | 0.06 | −0.17 | 0.07 | No | No |
| T616H | 0.62 | 0.08 | −0.13 | 0.10 | 1.21 | 0.25 | Yes | No |
| T616I | −0.33 | 0.08 | 0.30 | 0.07 | 0.19 | 0.18 | Yes | No |
| T616L | −0.27 | 0.05 | −0.43 | 0.05 | −0.19 | 0.13 | No | No |
| T616K | −0.36 | 0.08 | 0.23 | 0.07 | 0.66 | 0.09 | Yes | No |
| T616M | −0.49 | 0.08 | −0.40 | 0.08 | −0.44 | 0.25 | No | No |
| T616F | −0.58 | 0.11 | 0.07 | 0.09 | 0.10 | 0.36 | Yes | No |
| T616P | −0.89 | 0.07 | −0.68 | 0.07 | −0.80 | 0.06 | No | No |
| T616S | −0.02 | 0.04 | 0.12 | 0.04 | 0.13 | 0.07 | Yes | No |
| T616* | NA | NA | NA | NA | −1.14 | 0.24 | Yes | No |
| T616W | −0.28 | 0.05 | 0.25 | 0.04 | −0.22 | 0.19 | Yes | No |
| T616V | −0.07 | 0.04 | −0.09 | 0.04 | 0.21 | 0.07 | Yes | No |
| A617G | 0.03 | 0.03 | 0.05 | 0.03 | 0.24 | 0.06 | Yes | Yes |
| A617R | −0.10 | 0.04 | 0.07 | 0.04 | −0.32 | 0.11 | Yes | No |
| A617N | NA | NA | NA | NA | 0.12 | 0.42 | Yes | No |
| A617D | −0.76 | 0.09 | −0.05 | 0.07 | NA | NA | Yes | No |
| A617C | −0.73 | 0.09 | 0.26 | 0.07 | 0.13 | 0.18 | Yes | No |
| A617Q | 0.25 | 0.08 | 0.07 | 0.09 | −0.48 | 0.30 | Yes | No |
| A617E | −0.12 | 0.06 | 0.08 | 0.06 | −0.40 | 0.20 | Yes | No |
| A617H | −0.11 | 0.11 | −0.46 | 0.12 | NA | NA | Yes | No |
| A617I | −0.26 | 0.11 | 0.09 | 0.10 | −0.52 | 0.38 | Yes | No |
| A617L | −0.11 | 0.05 | 0.18 | 0.05 | −0.18 | 0.16 | Yes | No |
| A617K | NA | NA | NA | NA | −0.08 | 0.28 | Yes | No |
| A617M | 0.32 | 0.07 | 0.30 | 0.07 | −0.34 | 0.27 | Yes | No |
| A617F | −0.17 | 0.10 | −0.39 | 0.11 | −0.42 | 0.36 | No | No |
| A617P | −0.48 | 0.08 | −0.88 | 0.09 | 0.05 | 0.18 | Yes | No |
| A617S | −0.13 | 0.05 | 0.25 | 0.05 | −0.58 | 0.06 | Yes | No |
| A617* | −0.96 | 0.11 | −1.57 | 0.14 | NA | NA | Yes | No |
| A617T | −0.23 | 0.05 | 0.26 | 0.05 | −0.30 | 0.10 | Yes | No |
| A617W | 0.17 | 0.05 | −0.93 | 0.07 | −0.69 | 0.15 | Yes | No |
| A617V | −0.03 | 0.04 | −0.09 | 0.04 | −0.42 | 0.12 | No | No |
| H618A | −0.73 | 0.14 | −0.80 | 0.15 | 0.36 | 0.36 | Yes | No |
| H618R | −0.08 | 0.05 | 0.24 | 0.05 | −0.46 | 0.06 | Yes | No |
| H618N | −0.37 | 0.17 | −0.24 | 0.16 | NA | NA | Yes | No |
| H618D | 0.48 | 0.13 | 0.89 | 0.12 | NA | NA | Yes | No |
| H618Q | −0.62 | 0.14 | 0.01 | 0.12 | NA | NA | Yes | No |
| H618G | −0.56 | 0.07 | −0.91 | 0.09 | −0.91 | 0.19 | No | No |
| H618L | 0.02 | 0.06 | 0.10 | 0.06 | −0.47 | 0.07 | Yes | No |
| H618P | 0.32 | 0.08 | 0.47 | 0.08 | −0.51 | 0.08 | Yes | No |
| H618S | −0.50 | 0.14 | −0.26 | 0.13 | NA | NA | Yes | No |
| H618W | NA | NA | NA | NA | 0.44 | 0.31 | Yes | No |
| H618Y | 0.23 | 0.10 | −0.28 | 0.11 | −0.26 | 0.19 | Yes | No |
| F619M | 0.12 | 0.07 | 0.55 | 0.07 | 0.22 | 0.25 | Yes | Yes |
| F619A | −0.57 | 0.05 | −1.25 | 0.06 | −0.78 | 0.05 | No | No |
| F619R | −1.24 | 0.05 | −1.94 | 0.07 | −0.66 | 0.07 | No | No |
| F619N | −0.61 | 0.13 | −0.15 | 0.12 | NA | NA | Yes | No |
| F619D | −1.39 | 0.12 | −0.62 | 0.09 | NA | NA | Yes | No |
| F619C | 0.07 | 0.03 | 0.08 | 0.03 | −0.37 | 0.04 | Yes | No |
| F619Q | −1.13 | 0.12 | −1.57 | 0.15 | NA | NA | Yes | No |
| F619E | −1.58 | 0.08 | −2.40 | 0.12 | −1.54 | 0.08 | No | No |
| F619G | −1.29 | 0.03 | −1.03 | 0.03 | −1.57 | 0.05 | No | No |
| F619H | NA | NA | NA | NA | −0.31 | 0.34 | Yes | No |
| F619I | −0.69 | 0.12 | −0.28 | 0.11 | −0.42 | 0.22 | No | No |
| F619L | 0.17 | 0.03 | 0.12 | 0.03 | −0.48 | 0.05 | Yes | No |
| F619P | −1.00 | 0.09 | −1.22 | 0.10 | NA | NA | Yes | No |
| F619S | −0.26 | 0.04 | −0.95 | 0.06 | −0.56 | 0.06 | No | No |
| F619* | −1.91 | 0.14 | −0.92 | 0.10 | NA | NA | Yes | No |
| F619T | NA | NA | NA | NA | −1.08 | 0.24 | Yes | No |
| F619W | −0.08 | 0.04 | −0.81 | 0.05 | 0.00 | 0.07 | Yes | No |
| F619Y | 0.06 | 0.08 | −0.79 | 0.11 | 0.28 | 0.11 | Yes | No |
| F619V | −0.51 | 0.04 | −0.49 | 0.04 | −0.64 | 0.04 | No | No |
| Q620A | 0.22 | 0.04 | 0.00 | 0.05 | 0.18 | 0.09 | Yes | Yes |
| Q620R | 0.25 | 0.03 | 0.18 | 0.03 | 0.17 | 0.04 | Yes | Yes |
| Q620N | 0.26 | 0.14 | 0.28 | 0.14 | 0.36 | 0.21 | Yes | Yes |
| Q620L | 0.14 | 0.04 | 0.45 | 0.04 | 0.40 | 0.16 | Yes | Yes |
| Q620K | 0.10 | 0.07 | 0.24 | 0.07 | 0.04 | 0.10 | Yes | Yes |
| Q620D | −0.16 | 0.07 | −0.25 | 0.08 | 0.24 | 0.23 | Yes | No |
| Q620C | −0.22 | 0.07 | −0.95 | 0.10 | 0.03 | 0.23 | Yes | No |
| Q620E | 0.21 | 0.05 | 0.13 | 0.05 | −0.09 | 0.10 | Yes | No |
| Q620G | −0.14 | 0.02 | 0.02 | 0.02 | 0.19 | 0.04 | Yes | No |
| Q620H | −0.08 | 0.08 | 0.16 | 0.08 | −0.05 | 0.20 | Yes | No |
| Q620I | 0.27 | 0.11 | −0.38 | 0.14 | NA | NA | Yes | No |
| Q620M | 0.70 | 0.07 | −0.03 | 0.08 | 0.20 | 0.26 | Yes | No |
| Q620F | 0.37 | 0.11 | 1.00 | 0.10 | −0.47 | 0.44 | Yes | No |
| Q620P | −0.04 | 0.06 | 0.12 | 0.06 | −0.26 | 0.10 | Yes | No |
| Q620S | 0.17 | 0.05 | −0.15 | 0.06 | 0.16 | 0.17 | Yes | No |
| Q620* | −0.82 | 0.08 | −0.58 | 0.07 | −0.64 | 0.15 | No | No |
| Q620T | −0.20 | 0.09 | 0.41 | 0.08 | 0.17 | 0.12 | Yes | No |
| Q620W | −0.12 | 0.04 | 0.09 | 0.04 | 0.08 | 0.11 | Yes | No |
| Q620Y | −0.74 | 0.14 | 0.21 | 0.11 | −0.19 | 0.38 | Yes | No |
| Q620V | 0.29 | 0.03 | −0.11 | 0.04 | 0.26 | 0.07 | Yes | No |
| T621A | 0.18 | 0.04 | 0.13 | 0.04 | 0.17 | 0.10 | Yes | Yes |
| T621R | −0.04 | 0.04 | −0.45 | 0.05 | −0.06 | 0.15 | No | No |
| T621N | −0.39 | 0.12 | −0.09 | 0.11 | 0.02 | 0.21 | Yes | No |
| T621D | 0.12 | 0.12 | 0.26 | 0.12 | −0.11 | 0.44 | Yes | No |
| T621C | 0.07 | 0.09 | −0.29 | 0.10 | NA | NA | Yes | No |
| T621Q | −0.90 | 0.12 | 0.06 | 0.10 | 0.44 | 0.38 | Yes | No |
| T621E | −0.29 | 0.07 | 0.13 | 0.06 | −0.05 | 0.24 | Yes | No |
| T621G | −0.02 | 0.03 | −0.21 | 0.04 | 0.48 | 0.04 | Yes | No |
| T621H | 0.33 | 0.15 | 0.72 | 0.14 | NA | NA | Yes | No |
| T621I | 0.36 | 0.08 | −0.09 | 0.10 | 0.21 | 0.20 | Yes | No |
| T621L | 0.16 | 0.06 | −0.40 | 0.07 | −0.30 | 0.10 | Yes | No |
| T621K | −0.02 | 0.09 | −0.09 | 0.09 | −0.08 | 0.37 | No | No |
| T621M | 0.21 | 0.07 | −0.15 | 0.08 | 1.17 | 0.09 | Yes | No |
| T621F | −0.61 | 0.16 | −0.16 | 0.14 | NA | NA | Yes | No |
| T621P | 0.04 | 0.04 | 0.18 | 0.04 | −0.38 | 0.06 | Yes | No |
| T621S | −0.06 | 0.06 | −0.08 | 0.06 | 0.28 | 0.09 | Yes | No |
| T621W | −0.21 | 0.06 | 0.08 | 0.06 | 0.12 | 0.17 | Yes | No |
| T621Y | −0.23 | 0.16 | 0.36 | 0.14 | NA | NA | Yes | No |
| T621V | −0.28 | 0.05 | 0.32 | 0.05 | 0.32 | 0.19 | Yes | No |
| H622G | 0.05 | 0.03 | 0.18 | 0.03 | 0.07 | 0.06 | Yes | Yes |
| H622S | 0.16 | 0.06 | 0.59 | 0.06 | 0.08 | 0.10 | Yes | Yes |
| H622T | 0.01 | 0.09 | 0.84 | 0.08 | 0.31 | 0.34 | Yes | Yes |
| H622V | 0.18 | 0.05 | 0.15 | 0.05 | 0.31 | 0.12 | Yes | Yes |
| H622A | −0.17 | 0.06 | 0.16 | 0.06 | 0.41 | 0.08 | Yes | No |
| H622R | −0.19 | 0.04 | 0.12 | 0.04 | 0.05 | 0.04 | Yes | No |
| H622N | −0.05 | 0.07 | 0.30 | 0.07 | −0.11 | 0.12 | Yes | No |
| H622D | −0.84 | 0.11 | 0.63 | 0.07 | 0.48 | 0.10 | Yes | No |
| H622C | −0.50 | 0.09 | −0.10 | 0.08 | 0.11 | 0.11 | Yes | No |
| H622Q | −0.06 | 0.08 | 0.29 | 0.07 | −0.14 | 0.05 | Yes | No |
| H622E | −0.11 | 0.07 | 0.15 | 0.06 | 0.23 | 0.10 | Yes | No |
| H622I | −0.05 | 0.14 | 0.45 | 0.13 | 0.36 | 0.49 | Yes | No |
| H622L | −0.49 | 0.06 | 0.06 | 0.05 | −0.14 | 0.11 | Yes | No |
| H622K | 0.29 | 0.10 | 1.39 | 0.08 | 0.00 | 0.28 | Yes | No |
| H622M | −0.07 | 0.11 | −0.07 | 0.11 | 0.05 | 0.34 | Yes | No |
| H622F | 0.14 | 0.11 | −0.61 | 0.14 | 0.07 | 0.13 | Yes | No |
| H622P | 0.14 | 0.03 | 0.25 | 0.03 | −0.44 | 0.04 | Yes | No |
| H622* | −1.50 | 0.13 | −1.18 | 0.12 | −0.74 | 0.16 | No | No |
| H622W | 0.08 | 0.05 | 0.21 | 0.05 | −0.08 | 0.19 | Yes | No |
| H622Y | 0.07 | 0.09 | 0.14 | 0.09 | −0.08 | 0.18 | Yes | No |
| T623E | 0.32 | 0.05 | 0.23 | 0.05 | 0.02 | 0.05 | Yes | Yes |
| T623H | 0.60 | 0.10 | 0.01 | 0.11 | 0.58 | 0.55 | Yes | Yes |
| T623L | 0.33 | 0.05 | 0.18 | 0.05 | 0.17 | 0.16 | Yes | Yes |
| T623M | 0.21 | 0.07 | 0.28 | 0.07 | 0.59 | 0.22 | Yes | Yes |
| T623F | 0.80 | 0.10 | 0.61 | 0.10 | 0.47 | 0.32 | Yes | Yes |
| T623A | −0.14 | 0.04 | 0.35 | 0.03 | −0.04 | 0.07 | Yes | No |
| T623R | −0.16 | 0.03 | −0.40 | 0.04 | 0.15 | 0.09 | Yes | No |
| T623N | 0.02 | 0.09 | 0.19 | 0.09 | −0.28 | 0.16 | Yes | No |
| T623D | −0.69 | 0.09 | 0.41 | 0.07 | −0.34 | 0.14 | Yes | No |
| T623C | −0.39 | 0.08 | 0.01 | 0.08 | 0.40 | 0.28 | Yes | No |
| T623Q | 0.23 | 0.07 | 0.38 | 0.07 | −0.01 | 0.32 | Yes | No |
| T623G | −0.40 | 0.03 | −0.09 | 0.03 | −0.05 | 0.03 | No | No |
| T623I | −0.59 | 0.10 | 0.11 | 0.08 | −0.13 | 0.13 | Yes | No |
| T623K | 1.10 | 0.07 | −0.02 | 0.08 | 0.53 | 0.17 | Yes | No |
| T623P | −0.16 | 0.06 | −0.29 | 0.07 | −0.11 | 0.17 | No | No |
| T623S | 0.67 | 0.04 | 0.21 | 0.04 | −0.06 | 0.07 | Yes | No |
| T623W | −0.01 | 0.05 | −0.29 | 0.06 | −0.27 | 0.10 | No | No |
| T623Y | NA | NA | NA | NA | −0.11 | 0.29 | Yes | No |
| T623V | −0.26 | 0.04 | −0.20 | 0.04 | 0.41 | 0.05 | Yes | No |
| T624P | 0.92 | 0.02 | 0.92 | 0.02 | 0.04 | 0.03 | Yes | Yes |
| T624A | 0.65 | 0.02 | 0.76 | 0.02 | −0.07 | 0.03 | Yes | No |
| T624R | 0.41 | 0.07 | 0.34 | 0.07 | −0.55 | 0.23 | Yes | No |
| T624N | 0.15 | 0.10 | 0.20 | 0.10 | NA | NA | Yes | No |
| T624C | −0.20 | 0.15 | 0.21 | 0.14 | NA | NA | Yes | No |
| T624E | 0.38 | 0.09 | −0.63 | 0.12 | −0.11 | 0.55 | Yes | No |
| T624G | −0.21 | 0.06 | 0.12 | 0.06 | 0.15 | 0.21 | Yes | No |
| T624I | 0.58 | 0.11 | 0.35 | 0.11 | NA | NA | Yes | No |
| T624L | 0.41 | 0.09 | −0.84 | 0.13 | 0.96 | 0.48 | Yes | No |
| T624S | 1.15 | 0.04 | 1.20 | 0.04 | −0.13 | 0.04 | Yes | No |
| T624W | 0.56 | 0.10 | −0.20 | 0.12 | 0.10 | 0.16 | Yes | No |
| T624V | −0.12 | 0.08 | −0.52 | 0.10 | 0.18 | 0.23 | Yes | No |
| P625A | −0.27 | 0.11 | 0.30 | 0.10 | 0.31 | 0.10 | Yes | No |
| P625R | 0.06 | 0.07 | −1.01 | 0.10 | −0.04 | 0.22 | Yes | No |
| P625C | 0.56 | 0.14 | −0.17 | 0.16 | −0.02 | 0.82 | Yes | No |
| P625E | −0.24 | 0.13 | −0.22 | 0.13 | −0.41 | 0.64 | No | No |
| P625G | −0.41 | 0.08 | 0.40 | 0.06 | 0.04 | 0.24 | Yes | No |
| P625H | −0.25 | 0.15 | −0.02 | 0.15 | NA | NA | Yes | No |
| P625L | −0.48 | 0.09 | −0.82 | 0.11 | −0.56 | 0.17 | No | No |
| P625S | −0.38 | 0.08 | −0.55 | 0.09 | 0.03 | 0.20 | Yes | No |
| P625T | 0.30 | 0.08 | 0.23 | 0.08 | −0.06 | 0.10 | Yes | No |
| P625W | −0.60 | 0.13 | −0.64 | 0.13 | NA | NA | Yes | No |
| P625V | −0.17 | 0.09 | −0.63 | 0.11 | NA | NA | Yes | No |
| I626A | 0.16 | 0.12 | 0.80 | 0.11 | NA | NA | Yes | No |
| I626R | −0.89 | 0.12 | 0.14 | 0.09 | −0.09 | 0.31 | Yes | No |
| I626N | 0.42 | 0.04 | 0.61 | 0.04 | −0.37 | 0.06 | Yes | No |
| I626E | NA | NA | NA | NA | −0.15 | 0.55 | Yes | No |
| I626G | −1.04 | 0.10 | −1.35 | 0.12 | −0.48 | 0.27 | No | No |
| I626L | 0.61 | 0.11 | −0.85 | 0.16 | NA | NA | Yes | No |
| I626S | 0.36 | 0.04 | 0.60 | 0.04 | −0.65 | 0.07 | Yes | No |
| I626T | 0.17 | 0.02 | 0.34 | 0.02 | −0.37 | 0.03 | Yes | No |
| I626W | −0.74 | 0.16 | 0.22 | 0.13 | NA | NA | Yes | No |
| I626V | −0.51 | 0.10 | 0.05 | 0.09 | 0.10 | 0.18 | Yes | No |
| L627C | 0.14 | 0.13 | 0.84 | 0.11 | 0.57 | 0.48 | Yes | Yes |
| L627A | 0.00 | 0.08 | 0.24 | 0.08 | 1.31 | 0.29 | Yes | No |
| L627R | 0.29 | 0.04 | 0.03 | 0.04 | −0.10 | 0.05 | Yes | No |
| L627N | 0.71 | 0.15 | 1.09 | 0.15 | NA | NA | Yes | No |
| L627D | 0.32 | 0.10 | −1.12 | 0.16 | 1.13 | 0.55 | Yes | No |
| L627Q | 0.23 | 0.07 | 0.39 | 0.07 | −0.27 | 0.11 | Yes | No |
| L627E | 0.29 | 0.07 | −0.06 | 0.08 | 0.17 | 0.11 | Yes | No |
| L627G | −0.04 | 0.04 | −0.01 | 0.04 | 0.23 | 0.10 | Yes | No |
| L627K | 0.57 | 0.11 | 0.27 | 0.12 | NA | NA | Yes | No |
| L627M | −0.57 | 0.12 | 0.33 | 0.10 | −0.09 | 0.22 | Yes | No |
| L627P | 0.10 | 0.05 | 0.31 | 0.05 | −0.25 | 0.08 | Yes | No |
| L627S | 0.34 | 0.08 | 0.18 | 0.08 | −0.29 | 0.27 | Yes | No |
| L627* | 0.52 | 0.10 | −0.87 | 0.15 | NA | NA | Yes | No |
| L627T | 0.60 | 0.09 | −0.76 | 0.14 | NA | NA | Yes | No |
| L627W | −0.71 | 0.09 | 0.85 | 0.07 | 0.27 | 0.32 | Yes | No |
| L627V | −0.89 | 0.08 | 0.48 | 0.06 | −0.23 | 0.19 | Yes | No |
| L628C | 0.31 | 0.09 | 0.10 | 0.10 | 0.29 | 0.31 | Yes | Yes |
| L628W | 0.25 | 0.06 | 0.01 | 0.07 | 0.67 | 0.15 | Yes | Yes |
| L628A | −0.22 | 0.06 | −0.58 | 0.07 | −0.36 | 0.11 | No | No |
| L628R | −0.13 | 0.04 | −0.50 | 0.05 | 0.53 | 0.06 | Yes | No |
| L628Q | −0.10 | 0.10 | −0.04 | 0.10 | −0.36 | 0.23 | No | No |
| L628E | −0.73 | 0.10 | −1.59 | 0.14 | NA | NA | Yes | No |
| L628G | −0.65 | 0.04 | −1.57 | 0.06 | −0.96 | 0.14 | No | No |
| L628I | −0.47 | 0.17 | −0.57 | 0.17 | NA | NA | Yes | No |
| L628K | 0.75 | 0.11 | −0.44 | 0.15 | −0.21 | 0.31 | Yes | No |
| L628M | −0.49 | 0.09 | −0.37 | 0.09 | −0.21 | 0.12 | No | No |
| L628P | −0.27 | 0.08 | −0.45 | 0.08 | −0.39 | 0.14 | No | No |
| L628S | −0.78 | 0.08 | −1.36 | 0.10 | −0.83 | 0.21 | No | No |
| L628T | −0.16 | 0.10 | −0.52 | 0.12 | −0.60 | 0.27 | No | No |
| L628V | −0.13 | 0.05 | 0.34 | 0.05 | −0.31 | 0.09 | Yes | No |
| S629A | −0.99 | 0.12 | 0.49 | 0.08 | −0.09 | 0.29 | Yes | No |
| S629R | 0.10 | 0.02 | 0.29 | 0.02 | −0.37 | 0.03 | Yes | No |
| S629N | 0.40 | 0.05 | 0.36 | 0.05 | −0.32 | 0.08 | Yes | No |
| S629D | −0.54 | 0.18 | −0.23 | 0.17 | NA | NA | Yes | No |
| S629C | 0.30 | 0.10 | 0.10 | 0.11 | −0.08 | 0.21 | Yes | No |
| S629Q | 0.76 | 0.17 | 0.40 | 0.18 | NA | NA | Yes | No |
| S629E | 0.84 | 0.10 | 0.61 | 0.11 | −0.08 | 0.48 | Yes | No |
| S629G | −0.30 | 0.05 | 0.40 | 0.05 | 0.09 | 0.08 | Yes | No |
| S629I | 0.05 | 0.14 | 0.42 | 0.13 | NA | NA | Yes | No |
| S629L | NA | NA | NA | NA | 0.03 | 0.36 | Yes | No |
| S629K | 0.37 | 0.13 | 0.80 | 0.12 | NA | NA | Yes | No |
| S629P | −0.03 | 0.15 | −0.34 | 0.17 | NA | NA | Yes | No |
| S629T | −0.60 | 0.13 | 0.01 | 0.11 | 0.22 | 0.32 | Yes | No |
| S629W | −0.03 | 0.11 | −0.66 | 0.13 | 0.42 | 0.54 | Yes | No |
| S629V | −0.87 | 0.11 | −0.82 | 0.11 | 0.05 | 0.14 | Yes | No |
| N630R | 0.53 | 0.05 | 0.06 | 0.06 | 0.94 | 0.08 | Yes | Yes |
| N630A | −0.53 | 0.09 | 0.62 | 0.07 | −0.06 | 0.23 | Yes | No |
| N630D | −0.33 | 0.09 | 0.49 | 0.07 | −0.22 | 0.14 | Yes | No |
| N630C | 0.42 | 0.10 | −0.12 | 0.12 | NA | NA | Yes | No |
| N630E | −0.67 | 0.09 | 0.69 | 0.07 | −0.30 | 0.26 | Yes | No |
| N630G | 0.32 | 0.04 | −0.11 | 0.04 | 0.22 | 0.10 | Yes | No |
| N630H | 0.06 | 0.10 | 0.51 | 0.09 | −0.29 | 0.13 | Yes | No |
| N630I | −0.45 | 0.12 | 0.44 | 0.10 | −0.27 | 0.18 | Yes | No |
| N630L | −0.24 | 0.09 | 0.55 | 0.08 | −0.78 | 0.15 | Yes | No |
| N630K | 0.37 | 0.10 | 0.93 | 0.09 | −0.25 | 0.18 | Yes | No |
| N630F | −0.58 | 0.18 | −0.11 | 0.16 | NA | NA | Yes | No |
| N630S | 0.34 | 0.06 | −0.21 | 0.07 | 0.16 | 0.13 | Yes | No |
| N630T | 0.16 | 0.03 | 0.38 | 0.02 | −0.53 | 0.04 | Yes | No |
| N630W | −0.11 | 0.09 | −1.04 | 0.12 | NA | NA | Yes | No |
| N630Y | −0.24 | 0.12 | 0.59 | 0.10 | 0.14 | 0.19 | Yes | No |
| N630V | −0.20 | 0.06 | −0.90 | 0.08 | −0.26 | 0.18 | No | No |
| N631A | −0.03 | 0.07 | 0.06 | 0.07 | −0.70 | 0.25 | Yes | No |
| N631R | −0.11 | 0.06 | 0.27 | 0.05 | 1.20 | 0.07 | Yes | No |
| N631D | −0.56 | 0.10 | −0.38 | 0.09 | −0.77 | 0.13 | No | No |
| N631C | −0.71 | 0.15 | −0.64 | 0.15 | NA | NA | Yes | No |
| N631E | NA | NA | NA | NA | −0.95 | 0.23 | Yes | No |
| N631G | −0.67 | 0.05 | −0.39 | 0.05 | −1.02 | 0.07 | No | No |
| N631I | 0.31 | 0.10 | −0.62 | 0.13 | NA | NA | Yes | No |
| N631L | −1.12 | 0.10 | −0.57 | 0.08 | NA | NA | Yes | No |
| N631K | −0.05 | 0.08 | −0.20 | 0.09 | 0.70 | 0.11 | Yes | No |
| N631M | −0.10 | 0.10 | 0.36 | 0.09 | −0.27 | 0.30 | Yes | No |
| N631P | 0.06 | 0.12 | 0.30 | 0.12 | NA | NA | Yes | No |
| N631S | 0.15 | 0.06 | 0.06 | 0.06 | −0.36 | 0.13 | Yes | No |
| N631T | 0.07 | 0.04 | 0.24 | 0.04 | −0.37 | 0.05 | Yes | No |
| N631Y | −0.48 | 0.12 | −0.03 | 0.11 | NA | NA | Yes | No |
| N631V | −0.66 | 0.07 | −1.17 | 0.08 | −0.78 | 0.23 | No | No |
| F632A | −0.79 | 0.07 | −1.34 | 0.09 | −1.29 | 0.12 | No | No |
| F632R | −0.76 | 0.05 | −0.40 | 0.05 | −0.13 | 0.05 | No | No |
| F632D | −1.62 | 0.15 | −1.61 | 0.15 | NA | NA | Yes | No |
| F632C | 0.66 | 0.02 | 0.78 | 0.02 | −0.06 | 0.02 | Yes | No |
| F632Q | NA | NA | NA | NA | −0.18 | 0.55 | Yes | No |
| F632E | −1.35 | 0.10 | −0.87 | 0.09 | NA | NA | Yes | No |
| F632G | −0.01 | 0.03 | 0.12 | 0.03 | −0.03 | 0.02 | Yes | No |
| F632H | −0.31 | 0.16 | 0.08 | 0.15 | NA | NA | Yes | No |
| F632I | −0.33 | 0.10 | −0.01 | 0.10 | −0.87 | 0.13 | No | No |
| F632L | −0.28 | 0.05 | 0.22 | 0.05 | −0.26 | 0.07 | Yes | No |
| F632K | −0.49 | 0.13 | 0.74 | 0.10 | NA | NA | Yes | No |
| F632M | 0.00 | 0.10 | 0.16 | 0.10 | NA | NA | Yes | No |
| F632S | −0.75 | 0.06 | −0.56 | 0.06 | −0.83 | 0.06 | No | No |
| F632* | −0.69 | 0.12 | −0.55 | 0.12 | NA | NA | Yes | No |
| F632T | −0.09 | 0.09 | −0.80 | 0.12 | NA | NA | Yes | No |
| F632W | 0.17 | 0.06 | −0.14 | 0.06 | −0.44 | 0.19 | Yes | No |
| F632Y | −0.15 | 0.08 | 0.38 | 0.07 | −0.07 | 0.10 | Yes | No |
| F632V | 0.38 | 0.02 | 0.41 | 0.02 | −0.07 | 0.02 | Yes | No |
| I633N | 0.16 | 0.06 | 0.65 | 0.06 | 0.15 | 0.10 | Yes | Yes |
| I633M | 0.17 | 0.07 | 0.28 | 0.07 | 0.10 | 0.19 | Yes | Yes |
| I633S | 0.02 | 0.04 | 0.35 | 0.04 | 0.22 | 0.08 | Yes | Yes |
| I633A | 0.15 | 0.05 | −0.24 | 0.06 | 0.42 | 0.13 | Yes | No |
| I633R | −0.42 | 0.04 | 0.41 | 0.04 | 0.22 | 0.06 | Yes | No |
| I633D | −0.62 | 0.09 | −0.01 | 0.08 | −0.12 | 0.10 | No | No |
| I633C | 0.15 | 0.07 | −0.34 | 0.08 | −0.04 | 0.14 | Yes | No |
| I633Q | −0.26 | 0.10 | 1.05 | 0.08 | −0.37 | 0.22 | Yes | No |
| I633E | −0.98 | 0.07 | −0.34 | 0.06 | 0.30 | 0.11 | Yes | No |
| I633G | −0.09 | 0.03 | 0.10 | 0.03 | 0.05 | 0.06 | Yes | No |
| I633H | −0.71 | 0.14 | −0.16 | 0.13 | NA | NA | Yes | No |
| I633L | −0.10 | 0.05 | 0.00 | 0.05 | 0.25 | 0.06 | Yes | No |
| I633K | −0.29 | 0.09 | 0.17 | 0.08 | 0.63 | 0.29 | Yes | No |
| I633F | −0.11 | 0.09 | 0.24 | 0.09 | 0.51 | 0.22 | Yes | No |
| I633P | 0.23 | 0.08 | −0.90 | 0.12 | 0.19 | 0.31 | Yes | No |
| I633* | −1.45 | 0.12 | −1.53 | 0.13 | NA | NA | Yes | No |
| I633T | 0.13 | 0.04 | 0.40 | 0.04 | −0.17 | 0.06 | Yes | No |
| I633W | −0.35 | 0.05 | 0.14 | 0.05 | −0.07 | 0.09 | Yes | No |
| I633Y | NA | NA | NA | NA | −0.09 | 0.34 | Yes | No |
| I633V | 0.09 | 0.04 | −0.06 | 0.04 | 0.39 | 0.06 | Yes | No |
| E634N | 0.52 | 0.12 | 0.46 | 0.12 | 0.00 | 0.36 | Yes | Yes |
| E634A | 0.20 | 0.02 | 0.38 | 0.02 | −0.36 | 0.03 | Yes | No |
| E634R | −0.06 | 0.04 | 0.30 | 0.04 | 0.33 | 0.08 | Yes | No |
| E634D | −0.10 | 0.06 | 0.30 | 0.06 | 0.01 | 0.10 | Yes | No |
| E634C | −0.12 | 0.08 | −0.30 | 0.09 | 0.42 | 0.13 | Yes | No |
| E634Q | −0.28 | 0.09 | 0.79 | 0.07 | 0.35 | 0.10 | Yes | No |
| E634G | −0.12 | 0.03 | 0.10 | 0.02 | 0.33 | 0.03 | Yes | No |
| E634I | 0.43 | 0.13 | −0.05 | 0.15 | NA | NA | Yes | No |
| E634L | 0.12 | 0.05 | −0.46 | 0.06 | 0.47 | 0.19 | Yes | No |
| E634K | 0.14 | 0.06 | −0.04 | 0.07 | 0.16 | 0.13 | Yes | No |
| E634M | −0.14 | 0.08 | −0.22 | 0.08 | 0.42 | 0.27 | Yes | No |
| E634F | 0.25 | 0.14 | 0.08 | 0.15 | NA | NA | Yes | No |
| E634P | −0.23 | 0.10 | −0.95 | 0.13 | NA | NA | Yes | No |
| E634S | −0.22 | 0.06 | 0.07 | 0.05 | 0.30 | 0.07 | Yes | No |
| E634* | 0.11 | 0.03 | 0.29 | 0.03 | −0.34 | 0.05 | Yes | No |
| E634T | 0.01 | 0.09 | 0.30 | 0.08 | −0.51 | 0.28 | Yes | No |
| E634W | −0.46 | 0.06 | 0.16 | 0.05 | 0.45 | 0.17 | Yes | No |
| E634V | −0.20 | 0.04 | 0.26 | 0.04 | 0.33 | 0.08 | Yes | No |
| P635A | 0.04 | 0.05 | 0.29 | 0.05 | 0.59 | 0.07 | Yes | Yes |
| P635D | 0.14 | 0.09 | 0.49 | 0.09 | 0.52 | 0.14 | Yes | Yes |
| P635E | 0.51 | 0.06 | 0.49 | 0.06 | 0.70 | 0.16 | Yes | Yes |
| P635T | 0.36 | 0.06 | 0.06 | 0.06 | 0.01 | 0.08 | Yes | Yes |
| P635R | −0.51 | 0.04 | −0.39 | 0.04 | 0.24 | 0.08 | Yes | No |
| P635N | 0.13 | 0.14 | −0.31 | 0.16 | NA | NA | Yes | No |
| P635C | −0.65 | 0.10 | −0.70 | 0.11 | 0.26 | 0.25 | Yes | No |
| P635Q | −0.86 | 0.12 | −0.40 | 0.11 | 0.43 | 0.38 | Yes | No |
| P635G | −0.01 | 0.03 | −0.02 | 0.03 | 0.15 | 0.06 | Yes | No |
| P635H | −0.05 | 0.10 | 0.20 | 0.09 | 0.22 | 0.07 | Yes | No |
| P635I | NA | NA | NA | NA | 0.13 | 0.37 | Yes | No |
| P635L | −0.02 | 0.05 | −0.33 | 0.06 | 0.22 | 0.10 | Yes | No |
| P635K | NA | NA | NA | NA | 0.18 | 0.41 | Yes | No |
| P635M | 0.96 | 0.08 | −0.61 | 0.12 | 0.06 | 0.31 | Yes | No |
| P635F | 1.00 | 0.11 | 0.14 | 0.13 | NA | NA | Yes | No |
| P635S | −0.22 | 0.06 | 0.35 | 0.05 | 0.02 | 0.12 | Yes | No |
| P635W | −0.24 | 0.06 | 0.25 | 0.06 | −0.12 | 0.20 | Yes | No |
| P635Y | −0.31 | 0.15 | −0.01 | 0.14 | NA | NA | Yes | No |
| P635V | −0.06 | 0.05 | −0.29 | 0.05 | 0.44 | 0.20 | Yes | No |
| L636A | −0.52 | 0.05 | −1.17 | 0.06 | 0.08 | 0.11 | Yes | No |
| L636R | −1.28 | 0.04 | −1.29 | 0.04 | −1.27 | 0.08 | No | No |
| L636C | −0.14 | 0.07 | −0.19 | 0.07 | −0.07 | 0.17 | No | No |
| L636Q | −0.25 | 0.05 | −0.09 | 0.05 | −0.16 | 0.09 | No | No |
| L636E | −1.02 | 0.07 | −0.96 | 0.07 | −1.27 | 0.21 | No | No |
| L636G | −1.44 | 0.04 | −1.31 | 0.04 | −1.36 | 0.06 | No | No |
| L636I | −0.87 | 0.13 | −0.24 | 0.11 | NA | NA | Yes | No |
| L636K | −0.17 | 0.08 | −0.33 | 0.09 | −1.00 | 0.28 | No | No |
| L636M | −0.40 | 0.07 | −0.08 | 0.06 | 0.16 | 0.16 | Yes | No |
| L636F | −0.45 | 0.10 | 0.29 | 0.09 | NA | NA | Yes | No |
| L636P | 0.24 | 0.05 | −0.84 | 0.06 | −0.88 | 0.11 | Yes | No |
| L636S | −1.62 | 0.07 | −1.47 | 0.07 | −0.73 | 0.15 | No | No |
| L636* | −1.09 | 0.10 | −1.51 | 0.12 | NA | NA | Yes | No |
| L636T | 0.12 | 0.06 | −2.04 | 0.13 | −0.41 | 0.09 | Yes | No |
| L636W | −0.55 | 0.05 | −1.36 | 0.06 | −0.68 | 0.11 | No | No |
| L636V | −0.35 | 0.04 | −0.05 | 0.03 | −0.65 | 0.08 | No | No |
| E637A | 0.15 | 0.04 | 0.23 | 0.04 | −0.25 | 0.07 | Yes | No |
| E637R | −0.23 | 0.07 | 1.02 | 0.06 | 0.18 | 0.32 | Yes | No |
| E637D | −0.88 | 0.14 | −0.01 | 0.11 | NA | NA | Yes | No |
| E637Q | 0.83 | 0.14 | 0.47 | 0.15 | NA | NA | Yes | No |
| E637G | −0.05 | 0.04 | 0.22 | 0.04 | 0.06 | 0.05 | Yes | No |
| E637L | NA | NA | NA | NA | 0.35 | 0.32 | Yes | No |
| E637K | −0.33 | 0.12 | −0.66 | 0.13 | NA | NA | Yes | No |
| E637M | 0.60 | 0.15 | 1.04 | 0.14 | NA | NA | Yes | No |
| E637S | 0.23 | 0.10 | −0.55 | 0.12 | 0.66 | 0.39 | Yes | No |
| E637* | −0.03 | 0.09 | 0.24 | 0.08 | NA | NA | Yes | No |
| E637W | −0.18 | 0.10 | −0.73 | 0.12 | −0.20 | 0.34 | No | No |
| E637V | −0.15 | 0.07 | −0.36 | 0.07 | −0.45 | 0.10 | No | No |
| I638R | −1.56 | 0.13 | −0.55 | 0.10 | NA | NA | Yes | No |
| I638N | 0.35 | 0.16 | 0.42 | 0.16 | −0.63 | 0.15 | Yes | No |
| I638C | 1.11 | 0.14 | −0.05 | 0.17 | NA | NA | Yes | No |
| I638L | NA | NA | NA | NA | −0.24 | 0.30 | Yes | No |
| I638S | 0.04 | 0.05 | 0.05 | 0.05 | −0.18 | 0.05 | Yes | No |
| I638T | −0.43 | 0.12 | −0.42 | 0.12 | −0.14 | 0.18 | No | No |
| I638V | 0.39 | 0.07 | −0.45 | 0.08 | −0.04 | 0.13 | Yes | No |
| T639G | 0.52 | 0.06 | 0.44 | 0.06 | 0.06 | 0.23 | Yes | Yes |
| T639A | 0.25 | 0.05 | 0.47 | 0.05 | −0.34 | 0.06 | Yes | No |
| T639R | −0.48 | 0.10 | −0.68 | 0.11 | −0.16 | 0.35 | No | No |
| T639N | 0.03 | 0.16 | −0.02 | 0.17 | NA | NA | Yes | No |
| T639D | 0.61 | 0.17 | 0.43 | 0.18 | NA | NA | Yes | No |
| T639E | 0.71 | 0.12 | 0.82 | 0.12 | NA | NA | Yes | No |
| T639I | 0.17 | 0.13 | −0.19 | 0.14 | NA | NA | Yes | No |
| T639L | −0.28 | 0.15 | −0.39 | 0.16 | NA | NA | Yes | No |
| T639P | −0.10 | 0.12 | 0.08 | 0.12 | −0.21 | 0.22 | Yes | No |
| T639S | 0.07 | 0.07 | 0.09 | 0.07 | −0.53 | 0.12 | Yes | No |
| T639V | 0.75 | 0.09 | −1.09 | 0.14 | 0.78 | 0.28 | Yes | No |
| K640A | −0.31 | 0.07 | −0.59 | 0.07 | 0.20 | 0.26 | Yes | No |
| K640R | −0.15 | 0.04 | 0.07 | 0.04 | 0.01 | 0.11 | Yes | No |
| K640N | 0.07 | 0.03 | 0.32 | 0.03 | −0.43 | 0.05 | Yes | No |
| K640D | −0.14 | 0.09 | −0.73 | 0.11 | −0.52 | 0.30 | No | No |
| K640C | 0.06 | 0.08 | 0.34 | 0.08 | −0.51 | 0.27 | Yes | No |
| K640Q | −0.86 | 0.12 | 0.36 | 0.09 | 0.29 | 0.31 | Yes | No |
| K640E | −0.30 | 0.06 | 0.08 | 0.06 | −0.03 | 0.15 | Yes | No |
| K640G | −0.26 | 0.04 | −0.59 | 0.04 | −0.48 | 0.12 | No | No |
| K640H | 0.81 | 0.12 | −0.26 | 0.15 | NA | NA | Yes | No |
| K640I | −0.10 | 0.12 | −0.11 | 0.12 | NA | NA | Yes | No |
| K640L | 0.21 | 0.06 | 0.05 | 0.06 | −0.31 | 0.20 | Yes | No |
| K640M | −1.04 | 0.15 | 0.36 | 0.10 | −0.12 | 0.31 | Yes | No |
| K640F | 0.24 | 0.12 | −0.13 | 0.13 | NA | NA | Yes | No |
| K640P | 0.40 | 0.09 | 0.14 | 0.10 | −0.03 | 0.55 | Yes | No |
| K640S | −0.60 | 0.07 | 0.52 | 0.06 | −0.11 | 0.22 | Yes | No |
| K640* | −0.85 | 0.10 | −0.19 | 0.09 | −0.96 | 0.21 | No | No |
| K640T | 0.10 | 0.03 | 0.35 | 0.03 | −0.52 | 0.06 | Yes | No |
| K640W | −0.53 | 0.07 | 0.41 | 0.06 | 0.12 | 0.25 | Yes | No |
| K640Y | −0.76 | 0.15 | −0.28 | 0.14 | 0.36 | 0.37 | Yes | No |
| K640V | −0.26 | 0.05 | −0.56 | 0.05 | 0.05 | 0.11 | Yes | No |
| D840S | 0.37 | 0.08 | 0.33 | 0.08 | 0.10 | 0.16 | Yes | Yes |
| D840A | −0.07 | 0.07 | 0.40 | 0.06 | 0.18 | 0.13 | Yes | No |
| D840R | −0.03 | 0.05 | 0.09 | 0.05 | 0.10 | 0.33 | Yes | No |
| D840N | −0.64 | 0.12 | −0.31 | 0.11 | −0.04 | 0.16 | No | No |
| D840C | 0.62 | 0.12 | −1.20 | 0.16 | 0.07 | 0.48 | Yes | No |
| D840Q | −0.22 | 0.14 | −0.03 | 0.13 | 0.34 | NA | Yes | No |
| D840E | 0.32 | 0.07 | −0.07 | 0.07 | 0.08 | 0.06 | Yes | No |
| D840G | 0.21 | 0.04 | −0.26 | 0.04 | 0.02 | 0.05 | Yes | No |
| D840L | −0.64 | 0.10 | −0.25 | 0.09 | −0.27 | 0.82 | No | No |
| D840K | 0.13 | 0.13 | 0.33 | 0.12 | −0.03 | 0.82 | Yes | No |
| D840M | NA | NA | NA | NA | −0.30 | 0.13 | Yes | No |
| D840P | −0.09 | 0.12 | −0.12 | 0.12 | 0.11 | 0.82 | Yes | No |
| D840T | −1.14 | 0.14 | 0.11 | 0.10 | 0.29 | 0.15 | Yes | No |
| D840W | −0.33 | 0.09 | 0.05 | 0.08 | −0.39 | 0.19 | Yes | No |
| D840Y | 0.13 | 0.08 | 0.11 | 0.08 | −0.18 | 0.11 | Yes | No |
| D840V | 0.16 | 0.06 | −0.03 | 0.06 | −0.10 | 0.07 | Yes | No |
| E841A | −0.26 | 0.06 | −0.54 | 0.06 | 0.08 | 0.08 | Yes | No |
| E841R | −0.66 | 0.06 | −0.57 | 0.05 | −0.18 | 0.10 | No | No |
| E841N | 0.04 | 0.14 | −0.53 | 0.15 | −0.14 | 0.48 | Yes | No |
| E841D | −0.33 | 0.09 | −0.04 | 0.08 | 0.12 | 0.15 | Yes | No |
| E841C | −0.43 | 0.13 | −0.39 | 0.12 | −0.46 | 0.16 | No | No |
| E841Q | −0.64 | 0.12 | −0.41 | 0.11 | 0.21 | 0.14 | Yes | No |
| E841G | 0.21 | 0.04 | −0.11 | 0.04 | −0.04 | 0.04 | Yes | No |
| E841H | −0.71 | 0.18 | −0.82 | 0.18 | NA | NA | Yes | No |
| E841L | −1.39 | 0.10 | −0.35 | 0.07 | −0.41 | 0.06 | No | No |
| E841K | −0.55 | 0.09 | −0.26 | 0.09 | −0.34 | 0.17 | No | No |
| E841M | −1.21 | 0.14 | −0.41 | 0.11 | −0.24 | 0.54 | No | No |
| E841P | −0.22 | 0.11 | −0.23 | 0.11 | 0.00 | 0.08 | No | No |
| E841S | −0.16 | 0.07 | −0.22 | 0.07 | 0.04 | 0.10 | Yes | No |
| E841* | −0.19 | 0.06 | −0.19 | 0.06 | 0.07 | 0.03 | Yes | No |
| E841T | 0.40 | 0.09 | −0.59 | 0.10 | −0.27 | 0.19 | Yes | No |
| E841W | −1.06 | 0.09 | −1.15 | 0.09 | −1.11 | 0.33 | No | No |
| E841V | −0.99 | 0.07 | −0.68 | 0.06 | −0.53 | 0.08 | No | No |
| A842S | 0.36 | 0.06 | 0.08 | 0.06 | 0.04 | 0.10 | Yes | Yes |
| A842R | −2.56 | 0.11 | −1.06 | 0.06 | −1.25 | 0.15 | No | No |
| A842D | −0.37 | 0.11 | −1.49 | 0.15 | −1.07 | 0.19 | No | No |
| A842C | 0.15 | 0.10 | −0.39 | 0.11 | −0.26 | 0.13 | Yes | No |
| A842E | NA | NA | NA | NA | −1.19 | 0.12 | Yes | No |
| A842G | −0.18 | 0.04 | −0.18 | 0.04 | −0.09 | 0.04 | No | No |
| A842L | −1.71 | 0.11 | −1.29 | 0.09 | −1.19 | 0.33 | No | No |
| A842K | −0.53 | 0.13 | −1.41 | 0.16 | NA | NA | Yes | No |
| A842P | −0.87 | 0.10 | −0.94 | 0.10 | NA | NA | Yes | No |
| A842T | −1.47 | 0.11 | −0.57 | 0.08 | −1.03 | 0.10 | No | No |
| A842W | −1.87 | 0.12 | −1.92 | 0.12 | −1.46 | 0.40 | No | No |
| A842V | −1.40 | 0.08 | −0.77 | 0.06 | −1.17 | 0.20 | No | No |
| R843A | −0.28 | 0.10 | 0.30 | 0.09 | 0.15 | 0.11 | Yes | No |
| R843E | −1.03 | 0.17 | −1.31 | 0.17 | 0.09 | 0.64 | Yes | No |
| R843G | 0.18 | 0.05 | −0.37 | 0.06 | −0.43 | 0.07 | Yes | No |
| R843L | −0.31 | 0.13 | −0.08 | 0.12 | −0.05 | 0.30 | No | No |
| R843K | −0.16 | 0.13 | 0.01 | 0.12 | 0.45 | 0.16 | Yes | No |
| R843M | NA | NA | NA | NA | 0.26 | 0.83 | Yes | No |
| R843S | −0.08 | 0.07 | 0.08 | 0.07 | −0.08 | 0.10 | Yes | No |
| R843* | −0.64 | 0.17 | −0.23 | 0.15 | NA | NA | Yes | No |
| R843T | NA | NA | NA | NA | −0.19 | 0.30 | Yes | No |
| R843W | −0.99 | 0.15 | 0.22 | 0.12 | −0.55 | 0.14 | Yes | No |
| R843V | −0.09 | 0.10 | −0.23 | 0.10 | 0.04 | 0.17 | Yes | No |
| A844E | 0.38 | 0.10 | 0.06 | 0.10 | 0.13 | 0.21 | Yes | Yes |
| A844R | 0.45 | 0.07 | −0.04 | 0.07 | 0.03 | 0.37 | Yes | No |
| A844D | NA | NA | NA | NA | 0.36 | 0.11 | Yes | No |
| A844C | NA | NA | NA | NA | 0.02 | 0.19 | Yes | No |
| A844Q | −0.26 | 0.18 | 0.84 | 0.15 | −0.11 | 0.44 | Yes | No |
| A844G | −0.48 | 0.06 | −0.26 | 0.05 | −0.01 | 0.06 | No | No |
| A844L | 0.54 | 0.10 | −0.25 | 0.11 | 0.18 | 0.14 | Yes | No |
| A844K | NA | NA | NA | NA | 0.14 | 0.27 | Yes | No |
| A844M | NA | NA | NA | NA | 0.23 | 0.41 | Yes | No |
| A844P | 0.28 | 0.11 | −1.04 | 0.14 | −0.72 | 0.25 | Yes | No |
| A844S | −0.22 | 0.08 | −0.06 | 0.07 | 0.17 | 0.10 | Yes | No |
| A844T | −0.37 | 0.11 | −0.05 | 0.10 | 0.22 | 0.21 | Yes | No |
| A844W | −1.01 | 0.13 | −0.64 | 0.11 | −0.10 | NA | No | No |
| A844V | −0.19 | 0.08 | 0.12 | 0.07 | 0.06 | 0.08 | Yes | No |
| L845A | −0.70 | 0.08 | −0.23 | 0.07 | −0.59 | 0.11 | No | No |
| L845R | −2.01 | 0.10 | −1.83 | 0.09 | −1.29 | 0.05 | No | No |
| L845C | −0.27 | 0.14 | −0.84 | 0.15 | −0.37 | 0.82 | No | No |
| L845Q | NA | NA | NA | NA | −0.49 | 0.25 | Yes | No |
| L845E | −0.93 | 0.12 | −1.26 | 0.13 | −0.79 | 0.48 | No | No |
| L845G | −1.31 | 0.06 | −1.09 | 0.06 | −1.46 | 0.20 | No | No |
| L845K | −0.17 | 0.18 | 0.03 | 0.17 | NA | NA | Yes | No |
| L845M | −0.15 | 0.12 | −0.17 | 0.12 | −0.20 | 0.25 | No | No |
| L845P | −0.64 | 0.10 | −0.71 | 0.10 | −0.61 | 0.11 | No | No |
| L845S | −1.48 | 0.13 | −0.91 | 0.10 | −0.82 | 0.35 | No | No |
| L845T | −0.85 | 0.14 | 0.43 | 0.11 | NA | NA | Yes | No |
| L845W | −0.12 | 0.08 | −1.89 | 0.13 | −0.47 | 0.33 | No | No |
| L845V | −0.31 | 0.06 | −0.80 | 0.07 | −0.20 | 0.10 | No | No |
| L846A | −1.10 | 0.08 | −0.78 | 0.07 | −0.78 | 0.82 | No | No |
| L846R | −0.86 | 0.06 | −0.85 | 0.05 | −1.09 | 0.11 | No | No |
| L846C | −1.57 | 0.15 | −1.32 | 0.13 | −0.93 | 0.14 | No | No |
| L846Q | −1.21 | 0.15 | −0.87 | 0.13 | −0.99 | 0.27 | No | No |
| L846E | −0.34 | 0.08 | −0.41 | 0.08 | −0.71 | 0.17 | No | No |
| L846G | −1.11 | 0.05 | −0.81 | 0.05 | −1.29 | 0.15 | No | No |
| L846I | NA | NA | NA | NA | 0.11 | 0.49 | Yes | No |
| L846M | −0.29 | 0.09 | 0.19 | 0.08 | −0.28 | 0.13 | Yes | No |
| L846F | −0.48 | 0.14 | −0.27 | 0.13 | NA | NA | Yes | No |
| L846P | −1.04 | 0.10 | −0.74 | 0.09 | −0.74 | 0.13 | No | No |
| L846S | −0.77 | 0.09 | −0.24 | 0.08 | −1.23 | 0.37 | No | No |
| L846T | −0.74 | 0.12 | −1.37 | 0.14 | −0.56 | 0.12 | No | No |
| L846W | −1.13 | 0.09 | −0.51 | 0.08 | −0.35 | 0.06 | No | No |
| L846Y | −0.02 | 0.16 | −0.98 | 0.19 | NA | NA | Yes | No |
| L846V | −1.23 | 0.07 | −0.61 | 0.06 | −0.40 | 0.06 | No | No |
| P847A | 0.24 | 0.11 | −1.48 | 0.16 | NA | NA | Yes | No |
| P847R | −0.47 | 0.09 | −0.88 | 0.10 | −1.09 | 0.26 | No | No |
| P847G | −0.32 | 0.07 | −1.12 | 0.08 | −0.48 | 0.43 | No | No |
| P847H | −0.24 | 0.18 | −0.19 | 0.17 | −0.10 | 0.18 | No | No |
| P847L | −1.09 | 0.12 | −0.92 | 0.11 | −0.76 | 0.15 | No | No |
| P847S | −0.42 | 0.11 | −0.55 | 0.11 | −0.76 | 0.23 | No | No |
| P847T | −0.69 | 0.19 | −0.89 | 0.19 | NA | NA | Yes | No |
| P847V | −0.31 | 0.12 | −1.08 | 0.14 | NA | NA | Yes | No |
| N848A | −0.53 | 0.11 | 0.02 | 0.10 | 0.14 | 0.43 | Yes | No |
| N848R | −0.30 | 0.07 | −0.60 | 0.07 | −0.35 | 0.10 | No | No |
| N848D | 0.06 | 0.11 | −0.08 | 0.11 | −0.13 | 0.15 | Yes | No |
| N848C | −0.16 | 0.14 | −0.15 | 0.14 | −0.31 | NA | No | No |
| N848Q | −0.31 | 0.18 | −0.55 | 0.19 | NA | NA | Yes | No |
| N848E | −0.64 | 0.11 | 0.35 | 0.09 | 0.48 | 0.09 | Yes | No |
| N848G | −0.87 | 0.07 | −0.40 | 0.06 | −0.33 | 0.11 | No | No |
| N848H | −0.07 | 0.05 | 0.05 | 0.05 | −0.06 | 0.05 | Yes | No |
| N848I | 0.00 | 0.17 | −0.09 | 0.17 | NA | NA | Yes | No |
| N848L | 0.08 | 0.10 | −1.50 | 0.14 | −0.10 | NA | Yes | No |
| N848K | −0.25 | 0.14 | −0.45 | 0.14 | −0.20 | 0.19 | No | No |
| N848M | NA | NA | NA | NA | 0.10 | 0.64 | Yes | No |
| N848S | −0.89 | 0.10 | −0.37 | 0.08 | −0.30 | 0.16 | No | No |
| N848T | 0.37 | 0.12 | −0.11 | 0.12 | −0.17 | 0.11 | Yes | No |
| N848W | −0.76 | 0.12 | −0.04 | 0.10 | 0.22 | 0.40 | Yes | No |
| N848Y | −0.61 | 0.18 | 0.16 | 0.16 | −0.20 | 0.24 | Yes | No |
| N848V | −0.51 | 0.09 | −0.84 | 0.10 | −0.29 | 0.64 | No | No |
| V849A | −0.93 | 0.12 | 0.41 | 0.09 | −0.39 | 0.18 | Yes | No |
| V849R | −1.79 | 0.16 | −1.96 | 0.16 | −1.01 | 0.29 | No | No |
| V849G | −1.07 | 0.08 | −1.40 | 0.08 | −1.48 | 0.05 | No | No |
| V849L | 0.90 | 0.09 | −0.43 | 0.11 | −0.12 | 0.13 | Yes | No |
| V849M | −0.12 | 0.12 | −0.31 | 0.12 | −0.19 | 0.19 | No | No |
| I850A | 0.25 | 0.05 | −0.76 | 0.06 | −0.17 | 0.06 | Yes | No |
| I850R | −0.32 | 0.04 | −0.27 | 0.04 | −0.21 | 0.06 | No | No |
| I850N | −0.38 | 0.13 | −0.44 | 0.13 | −0.50 | 0.10 | No | No |
| I850D | −1.19 | 0.12 | −0.73 | 0.10 | −0.71 | 0.54 | No | No |
| I850C | −0.30 | 0.08 | 0.19 | 0.08 | 0.13 | 0.14 | Yes | No |
| I850Q | −0.08 | 0.11 | −0.31 | 0.11 | 0.00 | 0.43 | No | No |
| I850E | −0.24 | 0.07 | −0.45 | 0.07 | −0.35 | 0.25 | No | No |
| I850G | −0.90 | 0.04 | −0.86 | 0.04 | −0.96 | 0.06 | No | No |
| I850H | 0.45 | 0.12 | −0.44 | 0.13 | −0.29 | 0.54 | Yes | No |
| I850L | −0.15 | 0.04 | −0.17 | 0.04 | −0.26 | 0.05 | No | No |
| I850K | −1.20 | 0.13 | −0.19 | 0.10 | −0.01 | 0.82 | No | No |
| I850M | −0.83 | 0.09 | −0.82 | 0.09 | −0.28 | 0.18 | No | No |
| I850F | −0.83 | 0.11 | −0.97 | 0.11 | −0.61 | 0.17 | No | No |
| I850P | −0.43 | 0.09 | −1.72 | 0.12 | −1.01 | 0.12 | No | No |
| I850S | −0.42 | 0.06 | −0.18 | 0.05 | −0.52 | 0.06 | No | No |
| I850T | 0.00 | 0.07 | −0.22 | 0.07 | 0.06 | 0.07 | Yes | No |
| I850W | −1.02 | 0.07 | −1.26 | 0.08 | −0.97 | 0.10 | No | No |
| I850V | −0.03 | 0.04 | 0.12 | 0.04 | 0.22 | 0.05 | Yes | No |
| T851A | 0.41 | 0.06 | 0.14 | 0.06 | 0.08 | 0.10 | Yes | Yes |
| T851V | 0.32 | 0.06 | 0.13 | 0.06 | 0.54 | 0.07 | Yes | Yes |
| T851R | −0.18 | 0.06 | −0.82 | 0.06 | −0.93 | 0.17 | No | No |
| T851C | 0.00 | 0.14 | −0.03 | 0.14 | −0.11 | 0.82 | No | No |
| T851Q | NA | NA | NA | NA | −0.17 | 0.29 | Yes | No |
| T851E | −0.44 | 0.09 | −0.88 | 0.10 | −0.08 | 0.08 | No | No |
| T851G | −1.22 | 0.06 | −0.82 | 0.05 | −0.95 | 0.19 | No | No |
| T851I | 0.21 | 0.13 | −0.17 | 0.13 | 0.20 | 0.20 | Yes | No |
| T851L | 0.35 | 0.08 | 0.01 | 0.09 | −0.05 | 0.37 | Yes | No |
| T851K | −0.23 | 0.14 | −0.49 | 0.14 | NA | NA | Yes | No |
| T851M | 0.52 | 0.11 | −0.71 | 0.14 | −0.02 | 0.23 | Yes | No |
| T851F | −0.32 | 0.18 | 0.44 | 0.16 | 0.28 | NA | Yes | No |
| T851P | −0.06 | 0.04 | 0.04 | 0.04 | 0.03 | 0.05 | Yes | No |
| T851S | −0.01 | 0.07 | −0.04 | 0.07 | −0.08 | 0.13 | No | No |
| T851W | 0.07 | 0.09 | −0.34 | 0.09 | −0.01 | 0.48 | Yes | No |
| K852A | −1.49 | 0.14 | −1.41 | 0.13 | NA | NA | Yes | No |
| K852R | −0.07 | 0.06 | −0.48 | 0.07 | −0.37 | 0.10 | No | No |
| K852N | 0.12 | 0.10 | −0.39 | 0.11 | 0.01 | 0.08 | Yes | No |
| K852Q | −0.04 | 0.05 | 0.10 | 0.04 | 0.14 | 0.06 | Yes | No |
| K852E | −0.99 | 0.12 | −0.80 | 0.11 | −1.03 | 0.07 | No | No |
| K852G | −1.42 | 0.09 | −2.60 | 0.13 | −1.20 | 0.18 | No | No |
| K852P | −0.25 | 0.07 | −0.24 | 0.07 | −0.22 | 0.08 | No | No |
| K852S | −1.14 | 0.13 | −0.56 | 0.10 | −0.56 | 0.48 | No | No |
| K852* | −0.98 | 0.15 | −1.24 | 0.16 | NA | NA | Yes | No |
| K852T | −0.16 | 0.03 | −0.02 | 0.03 | 0.16 | 0.04 | Yes | No |
| K852V | −0.65 | 0.09 | −0.18 | 0.08 | −0.78 | 0.48 | No | No |
| E853V | 0.14 | 0.07 | 0.10 | 0.07 | 0.38 | 0.09 | Yes | Yes |
| E853A | −0.49 | 0.08 | −0.35 | 0.08 | −0.05 | 0.09 | No | No |
| E853R | 0.23 | 0.06 | −0.13 | 0.06 | −0.20 | 0.31 | Yes | No |
| E853D | −0.30 | 0.10 | −0.26 | 0.10 | 0.42 | 0.18 | Yes | No |
| E853C | 0.07 | 0.11 | 0.12 | 0.11 | −0.24 | 0.13 | Yes | No |
| E853Q | −0.55 | 0.17 | 0.09 | 0.14 | 0.17 | 0.31 | Yes | No |
| E853G | −0.18 | 0.04 | −0.41 | 0.05 | −0.47 | 0.07 | No | No |
| E853L | −0.85 | 0.10 | 0.03 | 0.08 | 0.08 | 0.08 | Yes | No |
| E853K | 0.05 | 0.12 | −0.95 | 0.15 | 0.21 | 0.20 | Yes | No |
| E853M | −0.08 | 0.15 | −0.94 | 0.17 | 0.01 | 0.11 | Yes | No |
| E853P | 0.46 | 0.13 | −0.02 | 0.14 | 0.28 | 0.40 | Yes | No |
| E853S | −0.30 | 0.09 | −0.41 | 0.09 | 0.07 | 0.15 | Yes | No |
| E853* | −0.52 | 0.09 | −0.38 | 0.09 | −0.25 | 0.08 | No | No |
| E853T | −0.33 | 0.15 | −0.61 | 0.15 | 0.57 | 0.25 | Yes | No |
| E853W | 0.25 | 0.08 | −1.68 | 0.12 | −0.52 | 0.14 | Yes | No |
| V854A | −0.95 | 0.08 | −0.31 | 0.06 | −0.94 | 0.15 | No | No |
| V854R | −1.42 | 0.07 | −1.14 | 0.06 | −1.31 | 0.13 | No | No |
| V854D | −0.58 | 0.13 | −1.22 | 0.15 | NA | NA | Yes | No |
| V854C | −0.91 | 0.13 | −0.17 | 0.11 | −0.54 | 0.35 | No | No |
| V854E | −1.32 | 0.11 | −1.01 | 0.09 | −1.15 | 0.18 | No | No |
| V854G | −1.40 | 0.06 | −1.44 | 0.06 | −1.28 | 0.09 | No | No |
| V854L | −1.49 | 0.10 | −0.60 | 0.07 | −1.28 | 0.13 | No | No |
| V854M | −1.32 | 0.13 | −1.02 | 0.11 | −0.94 | 0.16 | No | No |
| V854P | −1.29 | 0.16 | −1.22 | 0.15 | NA | NA | Yes | No |
| V854S | −1.58 | 0.12 | −0.89 | 0.09 | −1.26 | 0.21 | No | No |
| V854W | −1.48 | 0.10 | −0.37 | 0.07 | −1.34 | 0.06 | No | No |
| S855A | 0.70 | 0.10 | −0.77 | 0.12 | 0.01 | 0.40 | Yes | No |
| S855R | 0.40 | 0.10 | −0.66 | 0.11 | 0.61 | 0.12 | Yes | No |
| S855C | −0.24 | 0.17 | 0.37 | 0.15 | NA | NA | Yes | No |
| S855G | 0.01 | 0.07 | −0.69 | 0.08 | −0.49 | 0.48 | Yes | No |
| S855L | NA | NA | NA | NA | −0.20 | 0.82 | Yes | No |
| S855F | −0.02 | 0.17 | 0.31 | 0.16 | NA | NA | Yes | No |
| S855P | −0.31 | 0.12 | 0.14 | 0.10 | −0.08 | 0.16 | Yes | No |
| S855T | 0.53 | 0.13 | −0.42 | 0.15 | 0.41 | 0.24 | Yes | No |
| S855Y | NA | NA | NA | NA | 0.21 | 0.29 | Yes | No |
| S855V | 0.17 | 0.13 | 0.00 | 0.14 | 0.24 | 0.82 | Yes | No |
| H856R | −0.04 | 0.07 | −0.29 | 0.07 | −0.62 | 0.16 | No | No |
| H856N | −1.01 | 0.17 | −0.62 | 0.15 | NA | NA | Yes | No |
| H856E | −0.49 | 0.12 | −0.23 | 0.11 | NA | NA | Yes | No |
| H856G | −0.96 | 0.07 | −1.35 | 0.07 | −1.43 | 0.08 | No | No |
| H856L | −0.83 | 0.12 | −0.29 | 0.10 | −0.42 | 0.20 | No | No |
| H856P | −0.26 | 0.09 | 0.07 | 0.09 | −0.29 | 0.09 | Yes | No |
| H856S | −1.39 | 0.17 | −0.13 | 0.12 | NA | NA | Yes | No |
| H856W | NA | NA | NA | NA | −0.62 | 0.17 | Yes | No |
| H856Y | −0.65 | 0.16 | −0.05 | 0.13 | 0.50 | 0.20 | Yes | No |
| H856V | NA | NA | NA | NA | −0.60 | 0.21 | Yes | No |
| E857A | −0.23 | 0.05 | −0.30 | 0.05 | −0.51 | 0.06 | No | No |
| E857R | −0.92 | 0.06 | −1.30 | 0.06 | −1.05 | 0.13 | No | No |
| E857D | 0.50 | 0.09 | −0.31 | 0.10 | −1.09 | 0.21 | Yes | No |
| E857C | −0.44 | 0.13 | −1.14 | 0.15 | −0.59 | 0.40 | No | No |
| E857Q | −0.89 | 0.14 | −1.04 | 0.14 | −0.73 | 0.29 | No | No |
| E857G | −0.98 | 0.04 | −0.90 | 0.04 | −1.19 | 0.03 | No | No |
| E857L | −0.09 | 0.08 | −0.75 | 0.09 | −0.99 | 0.22 | No | No |
| E857K | 0.23 | 0.09 | −0.93 | 0.11 | −0.76 | 0.14 | Yes | No |
| E857M | −0.36 | 0.13 | −0.31 | 0.12 | NA | NA | Yes | No |
| E857P | −0.10 | 0.11 | −0.53 | 0.12 | −0.58 | 0.54 | No | No |
| E857S | −0.17 | 0.08 | −0.67 | 0.08 | −0.71 | 0.16 | No | No |
| E857* | −1.28 | 0.15 | −0.53 | 0.12 | NA | NA | Yes | No |
| E857T | −1.10 | 0.14 | 0.08 | 0.10 | −0.09 | 0.54 | Yes | No |
| E857W | −0.75 | 0.08 | −1.02 | 0.08 | −1.03 | 0.15 | No | No |
| E857V | −0.10 | 0.05 | −0.43 | 0.05 | −0.29 | 0.08 | No | No |
| I858R | −1.30 | 0.11 | −1.37 | 0.10 | −1.32 | 0.24 | No | No |
| I858G | −2.03 | 0.11 | −0.89 | 0.07 | −1.33 | 0.09 | No | No |
| I858L | −0.32 | 0.08 | −0.64 | 0.08 | −0.25 | 0.08 | No | No |
| I858F | −0.53 | 0.17 | −0.64 | 0.17 | NA | NA | Yes | No |
| I858S | −1.55 | 0.16 | −0.66 | 0.12 | NA | NA | Yes | No |
| I858T | −0.49 | 0.13 | −0.72 | 0.13 | −0.26 | 0.20 | No | No |
| I858V | −0.43 | 0.08 | −0.43 | 0.08 | −0.69 | 0.11 | No | No |
| I859A | −2.25 | 0.14 | −1.44 | 0.10 | −0.96 | 0.35 | No | No |
| I859R | −1.46 | 0.08 | −1.27 | 0.07 | −1.13 | 0.07 | No | No |
| I859N | −0.63 | 0.17 | −0.59 | 0.16 | −0.31 | 0.21 | No | No |
| I859D | −1.17 | 0.15 | −1.53 | 0.16 | NA | NA | Yes | No |
| I859Q | −0.35 | 0.17 | 0.41 | 0.15 | NA | NA | Yes | No |
| I859E | −0.25 | 0.09 | −0.09 | 0.08 | −0.48 | 0.11 | No | No |
| I859G | −1.65 | 0.07 | −1.30 | 0.06 | −1.32 | 0.22 | No | No |
| I859L | −0.20 | 0.04 | −0.01 | 0.04 | −0.26 | 0.04 | No | No |
| I859M | −0.66 | 0.12 | 0.38 | 0.10 | −0.64 | 0.11 | Yes | No |
| I859F | −0.18 | 0.12 | −0.15 | 0.12 | −0.59 | 0.12 | No | No |
| I859S | −0.34 | 0.08 | −1.05 | 0.09 | −1.12 | 0.17 | No | No |
| I859T | −0.26 | 0.09 | −0.27 | 0.09 | −0.35 | 0.15 | No | No |
| I859W | −1.84 | 0.15 | −0.31 | 0.09 | −0.74 | 0.64 | No | No |
| I859V | 0.30 | 0.04 | −0.13 | 0.05 | 0.24 | 0.05 | Yes | No |
| K860A | −0.50 | 0.06 | −0.35 | 0.06 | −1.06 | 0.07 | No | No |
| K860R | −0.39 | 0.05 | −0.83 | 0.05 | −0.83 | 0.10 | No | No |
| K860N | −0.63 | 0.12 | −1.47 | 0.14 | −0.88 | 0.16 | No | No |
| K860C | −0.36 | 0.10 | −0.81 | 0.11 | NA | NA | Yes | No |
| K860Q | −0.18 | 0.04 | −0.19 | 0.04 | −0.15 | 0.06 | No | No |
| K860E | −0.89 | 0.06 | −1.15 | 0.07 | −1.08 | 0.05 | No | No |
| K860G | −1.23 | 0.05 | −1.22 | 0.05 | −1.28 | 0.06 | No | No |
| K860L | −0.68 | 0.07 | −1.58 | 0.09 | −1.19 | 0.11 | No | No |
| K860M | −0.24 | 0.09 | −0.56 | 0.09 | −1.00 | 0.15 | No | No |
| K860P | −0.21 | 0.07 | −0.49 | 0.07 | −0.50 | 0.09 | No | No |
| K860S | −1.38 | 0.08 | −1.80 | 0.09 | −1.30 | 0.07 | No | No |
| K860* | −1.43 | 0.12 | −1.23 | 0.11 | −1.17 | 0.16 | No | No |
| K860T | −0.15 | 0.04 | −0.15 | 0.04 | −0.07 | 0.06 | No | No |
| K860W | −1.18 | 0.08 | −1.46 | 0.09 | −1.24 | 0.09 | No | No |
| K860V | −0.88 | 0.06 | −1.87 | 0.08 | −1.03 | 0.04 | No | No |
| D861A | −0.47 | 0.05 | −0.76 | 0.06 | −1.12 | 0.11 | No | No |
| D861R | −1.43 | 0.06 | −1.83 | 0.06 | −1.24 | 0.09 | No | No |
| D861N | −0.46 | 0.10 | −0.59 | 0.10 | −0.60 | 0.17 | No | No |
| D861C | −0.40 | 0.08 | −0.50 | 0.08 | −0.69 | 0.08 | No | No |
| D861Q | −0.65 | 0.11 | 0.09 | 0.09 | NA | NA | Yes | No |
| D861E | −0.97 | 0.07 | −0.89 | 0.06 | −0.50 | 0.12 | No | No |
| D861G | −0.85 | 0.03 | −1.00 | 0.03 | −1.03 | 0.03 | No | No |
| D861H | 0.92 | 0.12 | −0.60 | 0.15 | −0.36 | 0.21 | Yes | No |
| D861L | −0.37 | 0.07 | 0.09 | 0.06 | −0.18 | 0.27 | Yes | No |
| D861K | 0.55 | 0.09 | −1.49 | 0.13 | −1.22 | 0.43 | Yes | No |
| D861M | −0.29 | 0.10 | −0.57 | 0.10 | −0.68 | 0.40 | No | No |
| D861F | −1.05 | 0.15 | −0.55 | 0.13 | −0.22 | 0.12 | No | No |
| D861S | −1.43 | 0.09 | −1.60 | 0.09 | −1.45 | 0.28 | No | No |
| D861W | −0.88 | 0.07 | −0.84 | 0.07 | −0.15 | 0.08 | No | No |
| D861Y | −0.18 | 0.17 | 0.14 | 0.16 | −0.35 | 0.14 | Yes | No |
| D861V | −1.18 | 0.06 | −0.99 | 0.05 | −1.28 | 0.12 | No | No |
| R862K | 0.04 | 0.14 | 0.54 | 0.13 | 0.02 | 0.38 | Yes | Yes |
| R862A | −1.76 | 0.13 | −0.42 | 0.08 | −0.71 | 0.31 | No | No |
| R862C | −0.64 | 0.12 | −1.78 | 0.16 | −0.65 | 0.28 | No | No |
| R862Q | −0.27 | 0.10 | −0.07 | 0.09 | −0.28 | 0.13 | No | No |
| R862E | −0.64 | 0.12 | −1.63 | 0.15 | −0.76 | 0.09 | No | No |
| R862G | −0.72 | 0.05 | −0.83 | 0.05 | −0.85 | 0.07 | No | No |
| R862L | −0.90 | 0.08 | −0.16 | 0.07 | −0.39 | 0.09 | No | No |
| R862M | −1.06 | 0.17 | −0.69 | 0.15 | NA | NA | Yes | No |
| R862P | −1.33 | 0.17 | −1.10 | 0.15 | NA | NA | Yes | No |
| R862W | −1.35 | 0.11 | −0.91 | 0.09 | −1.10 | 0.14 | No | No |
| R862V | NA | NA | NA | NA | −1.61 | 0.43 | Yes | No |
| R863Q | −0.49 | 0.13 | −0.79 | 0.14 | NA | NA | Yes | No |
| R863G | −1.68 | 0.09 | −1.14 | 0.07 | −1.45 | 0.07 | No | No |
| R863L | −1.18 | 0.15 | −1.68 | 0.17 | −1.02 | 0.13 | No | No |
| R863W | −1.27 | 0.11 | −1.06 | 0.10 | −1.17 | 0.14 | No | No |
| F864I | −0.25 | 0.11 | −0.08 | 0.11 | −0.19 | 0.12 | No | No |
| F864L | 0.01 | 0.07 | −0.06 | 0.07 | 0.06 | 0.08 | Yes | No |
| F864S | −0.34 | 0.14 | −0.27 | 0.14 | −0.35 | 0.17 | No | No |
| F864W | −0.66 | 0.18 | −0.77 | 0.18 | NA | NA | Yes | No |
| F864V | −0.11 | 0.06 | −0.13 | 0.05 | 0.00 | 0.08 | No | No |
| T865A | −0.65 | 0.14 | −0.29 | 0.12 | −0.09 | 0.18 | No | No |
| T865N | 0.07 | 0.03 | −0.05 | 0.03 | −0.15 | 0.04 | Yes | No |
| T865I | −0.01 | 0.10 | 0.20 | 0.09 | 0.20 | 0.13 | Yes | No |
| T865L | NA | NA | NA | NA | 0.57 | 0.29 | Yes | No |
| T865P | −0.10 | 0.05 | −0.07 | 0.05 | −0.01 | 0.06 | No | No |
| T865S | −0.20 | 0.02 | −0.20 | 0.02 | 0.01 | 0.03 | Yes | No |
| T865Y | −0.16 | 0.06 | −0.17 | 0.05 | −0.16 | 0.10 | No | No |
| S866F | 0.00 | 0.13 | 0.06 | 0.12 | 0.10 | 0.14 | Yes | Yes |
| S866T | 0.05 | 0.13 | 0.02 | 0.13 | 0.40 | 0.15 | Yes | Yes |
| S866A | −0.10 | 0.09 | −0.40 | 0.10 | 0.05 | 0.07 | Yes | No |
| S866R | NA | NA | NA | NA | −0.33 | 0.09 | Yes | No |
| S866D | NA | NA | NA | NA | 0.02 | 0.24 | Yes | No |
| S866C | NA | NA | NA | NA | −0.05 | 0.43 | Yes | No |
| S866Q | NA | NA | NA | NA | −0.04 | 0.27 | Yes | No |
| S866E | NA | NA | NA | NA | 0.58 | 0.22 | Yes | No |
| S866G | NA | NA | NA | NA | −0.97 | 0.29 | Yes | No |
| S866L | NA | NA | NA | NA | 0.57 | 0.10 | Yes | No |
| S866M | NA | NA | NA | NA | 0.85 | 0.14 | Yes | No |
| S866P | 0.08 | 0.03 | −0.07 | 0.03 | 0.00 | 0.03 | Yes | No |
| S866W | NA | NA | NA | NA | −0.67 | 0.37 | Yes | No |
| S866Y | 0.13 | 0.16 | −0.17 | 0.17 | 0.03 | 0.11 | Yes | No |
| S866V | NA | NA | NA | NA | 1.00 | 0.08 | Yes | No |
| D867A | 0.05 | 0.02 | −0.05 | 0.02 | −0.05 | 0.02 | Yes | No |
| D867R | NA | NA | NA | NA | −1.39 | 0.06 | Yes | No |
| D867N | NA | NA | NA | NA | −0.17 | 0.14 | Yes | No |
| D867C | NA | NA | NA | NA | −0.98 | 0.17 | Yes | No |
| D867E | −0.16 | 0.11 | −0.21 | 0.11 | −0.99 | 0.09 | No | No |
| D867G | 0.06 | 0.02 | 0.00 | 0.02 | −0.11 | 0.02 | Yes | No |
| D867H | −0.04 | 0.09 | 0.11 | 0.08 | NA | NA | Yes | No |
| D867S | NA | NA | NA | NA | −0.98 | 0.09 | Yes | No |
| D867W | NA | NA | NA | NA | −1.25 | 0.13 | Yes | No |
| D867Y | NA | NA | NA | NA | −1.02 | 0.12 | Yes | No |
| D867V | −0.04 | 0.10 | −0.07 | 0.10 | −0.92 | 0.07 | No | No |
| K868A | NA | NA | NA | NA | −1.23 | 0.28 | Yes | No |
| K868R | −0.01 | 0.02 | 0.02 | 0.02 | −0.76 | 0.04 | Yes | No |
| K868N | NA | NA | NA | NA | −1.00 | 0.11 | Yes | No |
| K868Q | −0.14 | 0.09 | −0.02 | 0.09 | −0.11 | 0.08 | No | No |
| K868E | −0.43 | 0.19 | −0.52 | 0.19 | −1.33 | 0.19 | No | No |
| K868G | NA | NA | NA | NA | −1.49 | 0.08 | Yes | No |
| K868P | NA | NA | NA | NA | −1.00 | 0.09 | Yes | No |
| K868S | NA | NA | NA | NA | −1.32 | 0.15 | Yes | No |
| K868* | NA | NA | NA | NA | −1.02 | 0.18 | Yes | No |
| K868T | −0.15 | 0.03 | −0.12 | 0.03 | −0.14 | 0.07 | No | No |
| K868W | NA | NA | NA | NA | −1.50 | 0.15 | Yes | No |
| K868V | NA | NA | NA | NA | −1.12 | 0.16 | Yes | No |
| F869A | NA | NA | NA | NA | −1.10 | 0.15 | Yes | No |
| F869R | NA | NA | NA | NA | −1.47 | 0.27 | Yes | No |
| F869C | NA | NA | NA | NA | −1.20 | 0.15 | Yes | No |
| F869E | NA | NA | NA | NA | −1.41 | 0.09 | Yes | No |
| F869G | NA | NA | NA | NA | −1.40 | 0.04 | Yes | No |
| F869I | 0.06 | 0.10 | −0.10 | 0.10 | 0.04 | 0.09 | Yes | No |
| F869L | −0.16 | 0.03 | −0.17 | 0.03 | −0.01 | 0.06 | No | No |
| F869M | NA | NA | NA | NA | 0.14 | 0.09 | Yes | No |
| F869S | NA | NA | NA | NA | −1.16 | 0.09 | Yes | No |
| F869W | NA | NA | NA | NA | −1.32 | 0.12 | Yes | No |
| F869Y | NA | NA | NA | NA | −0.21 | 0.24 | Yes | No |
| F869V | −0.16 | 0.05 | −0.18 | 0.05 | −0.62 | 0.05 | No | No |
| L870A | −0.86 | 0.11 | −0.83 | 0.10 | NA | NA | Yes | No |
| L870R | −1.55 | 0.08 | −1.55 | 0.07 | NA | NA | Yes | No |
| L870E | −1.23 | 0.14 | −1.60 | 0.15 | NA | NA | Yes | No |
| L870G | −1.54 | 0.07 | −1.47 | 0.07 | NA | NA | Yes | No |
| L870M | −0.94 | 0.16 | −1.13 | 0.17 | NA | NA | Yes | No |
| L870F | −1.01 | 0.07 | −0.78 | 0.07 | NA | NA | Yes | No |
| L870P | −0.29 | 0.06 | −0.36 | 0.06 | NA | NA | Yes | No |
| L870V | −0.67 | 0.08 | −0.82 | 0.08 | NA | NA | Yes | No |
| F870A | NA | NA | NA | NA | −1.06 | 0.37 | Yes | No |
| F870R | NA | NA | NA | NA | −1.61 | 0.14 | Yes | No |
| F870C | NA | NA | NA | NA | −0.66 | 0.43 | Yes | No |
| F870G | NA | NA | NA | NA | −1.20 | 0.19 | Yes | No |
| F870I | NA | NA | NA | NA | 0.71 | 0.17 | Yes | No |
| F870L | NA | NA | NA | NA | 1.11 | 0.06 | Yes | No |
| F870M | NA | NA | NA | NA | −0.04 | 0.44 | Yes | No |
| F870S | NA | NA | NA | NA | −0.82 | 0.17 | Yes | No |
| F870V | NA | NA | NA | NA | 0.05 | 0.09 | Yes | No |
| F871R | NA | NA | NA | NA | −1.55 | 0.28 | Yes | No |
| F871C | −0.24 | 0.17 | −0.04 | 0.16 | NA | NA | Yes | No |
| F871G | NA | NA | NA | NA | −1.08 | 0.22 | Yes | No |
| F871L | −0.17 | 0.07 | −0.16 | 0.07 | −0.50 | 0.08 | No | No |
| F871S | NA | NA | NA | NA | −0.74 | 0.12 | Yes | No |
| F871V | 0.19 | 0.12 | −0.06 | 0.12 | −0.68 | 0.22 | Yes | No |
| H872R | −0.49 | 0.19 | −0.27 | 0.18 | −1.33 | 0.16 | No | No |
| H872Q | −0.40 | 0.10 | −0.32 | 0.10 | −0.60 | 0.11 | No | No |
| H872G | NA | NA | NA | NA | −1.61 | 0.11 | Yes | No |
| H872L | 0.00 | 0.08 | −0.15 | 0.08 | −0.43 | 0.08 | No | No |
| H872P | 0.04 | 0.02 | −0.01 | 0.02 | 0.34 | 0.02 | Yes | No |
| H872Y | NA | NA | NA | NA | 0.10 | 0.21 | Yes | No |
| H872V | NA | NA | NA | NA | −1.51 | 0.48 | Yes | No |
| V873A | 0.16 | 0.11 | 0.05 | 0.11 | 0.08 | 0.16 | Yes | Yes |
| V873E | −0.40 | 0.14 | −0.35 | 0.14 | NA | NA | Yes | No |
| V873G | −0.13 | 0.04 | −0.20 | 0.03 | −0.27 | 0.07 | No | No |
| V873L | −0.20 | 0.05 | 0.24 | 0.05 | −0.40 | 0.08 | Yes | No |
| V873M | −0.48 | 0.12 | −0.33 | 0.11 | −0.16 | 0.16 | No | No |
| P874A | −0.12 | 0.06 | 0.06 | 0.06 | 0.03 | 0.11 | Yes | No |
| P874G | NA | NA | NA | NA | −0.22 | 0.17 | Yes | No |
| P874S | −0.06 | 0.10 | −0.17 | 0.10 | 0.58 | 0.11 | Yes | No |
| P874T | −0.23 | 0.06 | −0.24 | 0.06 | −0.09 | 0.04 | No | No |
| I875R | −0.33 | 0.12 | −0.24 | 0.11 | −0.82 | 0.10 | No | No |
| I875N | −0.01 | 0.07 | −0.09 | 0.07 | 0.03 | 0.08 | Yes | No |
| I875G | NA | NA | NA | NA | −1.64 | 0.10 | Yes | No |
| I875H | 0.10 | 0.11 | −0.01 | 0.11 | −0.25 | 0.11 | Yes | No |
| I875L | 0.08 | 0.02 | 0.02 | 0.02 | −0.08 | 0.02 | Yes | No |
| I875M | −0.44 | 0.17 | −0.26 | 0.16 | 0.05 | 0.17 | Yes | No |
| I875F | −0.20 | 0.09 | −0.13 | 0.09 | −0.12 | 0.10 | No | No |
| I875S | −0.06 | 0.07 | −0.04 | 0.07 | −0.22 | 0.07 | No | No |
| I875T | −0.01 | 0.10 | −0.10 | 0.09 | −0.11 | 0.11 | No | No |
| I875V | −0.24 | 0.17 | −0.16 | 0.16 | −0.44 | 0.10 | No | No |
| T876A | NA | NA | NA | NA | −1.21 | 0.20 | Yes | No |
| T876R | NA | NA | NA | NA | −1.72 | 0.26 | Yes | No |
| T876N | −0.10 | 0.03 | −0.09 | 0.03 | −0.07 | 0.05 | No | No |
| T876G | NA | NA | NA | NA | −1.44 | 0.22 | Yes | No |
| T876P | −0.03 | 0.06 | −0.07 | 0.06 | −0.30 | 0.05 | No | No |
| T876S | NA | NA | NA | NA | −0.63 | 0.19 | Yes | No |
| T876V | NA | NA | NA | NA | −1.34 | 0.33 | Yes | No |
| L877A | 0.09 | 0.12 | −0.51 | 0.13 | NA | NA | Yes | No |
| L877R | −0.89 | 0.08 | −1.39 | 0.09 | −1.53 | 0.08 | No | No |
| L877C | −0.26 | 0.17 | −0.47 | 0.17 | NA | NA | Yes | No |
| L877Q | −0.43 | 0.11 | −0.45 | 0.11 | −0.39 | 0.13 | No | No |
| L877G | −1.42 | 0.09 | −2.38 | 0.13 | −1.74 | 0.35 | No | No |
| L877P | −0.08 | 0.07 | −0.22 | 0.07 | −0.40 | 0.12 | No | No |
| L877S | −1.11 | 0.16 | −0.99 | 0.15 | NA | NA | Yes | No |
| L877V | −1.25 | 0.14 | 0.04 | 0.10 | −0.96 | 0.08 | Yes | No |
| L877A | −0.03 | 0.10 | −0.76 | 0.11 | NA | NA | Yes | No |
| L877R | −0.15 | 0.04 | −0.31 | 0.04 | −0.02 | 0.04 | No | No |
| L877C | −0.29 | 0.15 | −0.65 | 0.15 | NA | NA | Yes | No |
| L877Q | −0.26 | 0.11 | −0.47 | 0.11 | NA | NA | Yes | No |
| L877E | NA | NA | NA | NA | −0.74 | 0.64 | Yes | No |
| L877G | −1.40 | 0.08 | −2.82 | 0.12 | −1.79 | 0.22 | No | No |
| L877M | −0.19 | 0.11 | 0.18 | 0.10 | 0.26 | 0.10 | Yes | No |
| L877P | −0.28 | 0.09 | −0.39 | 0.08 | −0.46 | 0.15 | No | No |
| L877S | −1.31 | 0.14 | −1.01 | 0.12 | NA | NA | Yes | No |
| L877V | −1.10 | 0.10 | −0.29 | 0.08 | −0.58 | 0.06 | No | No |
| N878D | 0.03 | 0.06 | 0.02 | 0.06 | 0.04 | 0.08 | Yes | Yes |
| N878A | 0.17 | 0.16 | −0.41 | 0.17 | −0.06 | 0.25 | Yes | No |
| N878Q | −0.22 | 0.17 | −0.53 | 0.17 | NA | NA | Yes | No |
| N878E | −0.73 | 0.15 | −0.44 | 0.13 | −0.84 | 0.13 | No | No |
| N878G | −0.57 | 0.10 | −0.98 | 0.11 | −0.70 | 0.06 | No | No |
| N878H | −0.01 | 0.05 | −0.10 | 0.05 | 0.03 | 0.05 | Yes | No |
| N878L | NA | NA | NA | NA | −0.13 | 0.64 | Yes | No |
| N878K | −0.01 | 0.02 | −0.05 | 0.02 | −0.06 | 0.02 | No | No |
| N878S | −1.08 | 0.15 | −0.43 | 0.12 | −0.38 | 0.10 | No | No |
| N878T | −0.16 | 0.06 | 0.09 | 0.06 | 0.15 | 0.07 | Yes | No |
| N878Y | −0.05 | 0.07 | 0.00 | 0.06 | 0.06 | 0.04 | Yes | No |
| N878V | −1.01 | 0.17 | −0.32 | 0.14 | −0.19 | 0.34 | No | No |
| N878A | 0.03 | 0.14 | −0.32 | 0.14 | −0.19 | 0.54 | Yes | No |
| N878D | −0.11 | 0.12 | −0.34 | 0.12 | −0.62 | 0.15 | No | No |
| N878C | NA | NA | NA | NA | 0.58 | 0.42 | Yes | No |
| N878G | −0.62 | 0.10 | −1.09 | 0.11 | −0.81 | 0.05 | No | No |
| N878I | −0.35 | 0.16 | −0.02 | 0.15 | −0.41 | 0.17 | No | No |
| N878L | NA | NA | NA | NA | −0.12 | 0.82 | Yes | No |
| N878K | −0.34 | 0.13 | −0.40 | 0.13 | −0.39 | 0.08 | No | No |
| N878M | NA | NA | NA | NA | 0.25 | 0.16 | Yes | No |
| N878S | −0.54 | 0.11 | −0.30 | 0.10 | −0.50 | 0.07 | No | No |
| N878T | −0.19 | 0.05 | −0.20 | 0.05 | −0.37 | 0.09 | No | No |
| N878Y | −0.34 | 0.18 | −0.28 | 0.17 | −0.12 | 0.21 | No | No |
| N878V | −0.98 | 0.15 | −0.37 | 0.12 | −0.51 | 0.32 | No | No |
| Y879A | −2.04 | 0.15 | −1.14 | 0.10 | NA | NA | Yes | No |
| Y879R | −0.78 | 0.08 | −1.40 | 0.08 | −1.48 | 0.11 | No | No |
| Y879D | 0.39 | 0.05 | −0.19 | 0.06 | −0.18 | 0.07 | Yes | No |
| Y879C | 0.50 | 0.06 | −0.02 | 0.07 | −0.50 | 0.09 | Yes | No |
| Y879Q | −0.72 | 0.19 | −0.38 | 0.17 | NA | NA | Yes | No |
| Y879E | −1.40 | 0.13 | −1.23 | 0.11 | NA | NA | Yes | No |
| Y879G | −0.58 | 0.05 | −1.93 | 0.07 | −1.84 | 0.23 | No | No |
| Y879H | 0.35 | 0.09 | 0.04 | 0.09 | −0.16 | 0.12 | Yes | No |
| Y879L | −1.45 | 0.13 | 0.26 | 0.08 | −1.39 | 0.33 | Yes | No |
| Y879K | 0.13 | 0.14 | −1.11 | 0.17 | NA | NA | Yes | No |
| Y879F | −0.05 | 0.12 | −0.01 | 0.11 | 0.01 | 0.17 | Yes | No |
| Y879S | 0.37 | 0.04 | −0.29 | 0.04 | −0.43 | 0.07 | Yes | No |
| Y879* | −0.20 | 0.11 | 0.92 | 0.09 | −0.81 | 0.15 | Yes | No |
| Y879W | −0.05 | 0.08 | −0.07 | 0.07 | 0.60 | 0.07 | Yes | No |
| Y879V | −0.53 | 0.08 | −0.97 | 0.08 | NA | NA | Yes | No |
| Q880R | 0.13 | 0.05 | 0.02 | 0.05 | 0.01 | 0.06 | Yes | Yes |
| Q880G | 0.25 | 0.04 | 0.19 | 0.04 | 0.64 | 0.05 | Yes | Yes |
| Q880A | −0.10 | 0.08 | 0.40 | 0.07 | −0.19 | 0.20 | Yes | No |
| Q880D | 0.81 | 0.14 | −1.10 | 0.18 | NA | NA | Yes | No |
| Q880C | −0.08 | 0.14 | −1.19 | 0.17 | 0.17 | 0.14 | Yes | No |
| Q880E | −0.73 | 0.10 | −1.06 | 0.10 | −0.58 | 0.08 | No | No |
| Q880H | 0.24 | 0.08 | −0.08 | 0.08 | −0.10 | 0.08 | Yes | No |
| Q880L | −0.80 | 0.08 | −0.59 | 0.07 | −1.39 | 0.07 | No | No |
| Q880K | −0.23 | 0.13 | −0.27 | 0.13 | −0.44 | 0.09 | No | No |
| Q880M | −0.93 | 0.16 | −0.77 | 0.14 | −0.49 | 0.17 | No | No |
| Q880P | −0.07 | 0.10 | −0.40 | 0.10 | 0.12 | 0.07 | Yes | No |
| Q880S | −0.31 | 0.09 | −0.76 | 0.10 | −0.09 | 0.07 | No | No |
| Q880* | −1.27 | 0.14 | −0.76 | 0.11 | −1.05 | 0.11 | No | No |
| Q880T | −0.52 | 0.14 | −0.18 | 0.12 | 0.07 | 0.29 | Yes | No |
| Q880W | −0.68 | 0.08 | −0.91 | 0.08 | −0.82 | 0.06 | No | No |
| Q880V | −1.77 | 0.10 | −0.81 | 0.07 | −0.63 | 0.07 | No | No |
| A881R | −0.95 | 0.07 | −1.75 | 0.08 | −1.43 | 0.18 | No | No |
| A881D | −0.36 | 0.11 | −0.32 | 0.10 | −0.48 | 0.19 | No | No |
| A881C | −0.35 | 0.14 | −0.78 | 0.15 | −0.49 | 0.10 | No | No |
| A881G | 0.14 | 0.04 | 0.32 | 0.04 | −0.41 | 0.04 | Yes | No |
| A881L | −1.36 | 0.11 | −2.39 | 0.15 | NA | NA | Yes | No |
| A881P | −1.05 | 0.16 | −0.99 | 0.14 | −0.80 | 0.18 | No | No |
| A881S | 0.13 | 0.05 | 0.13 | 0.05 | −0.13 | 0.06 | Yes | No |
| A881T | −0.73 | 0.10 | −0.95 | 0.10 | −0.44 | 0.14 | No | No |
| A881W | −1.25 | 0.12 | −1.48 | 0.12 | NA | NA | Yes | No |
| A881V | −1.66 | 0.09 | −1.28 | 0.07 | −0.91 | 0.08 | No | No |
| A882D | 0.32 | 0.05 | 0.22 | 0.05 | 0.10 | 0.07 | Yes | Yes |
| A882S | 0.11 | 0.12 | 0.14 | 0.11 | 0.23 | 0.22 | Yes | Yes |
| A882R | −0.10 | 0.10 | 0.54 | 0.09 | 0.51 | 0.35 | Yes | No |
| A882G | −0.43 | 0.07 | −0.32 | 0.06 | −0.14 | 0.06 | No | No |
| A882L | −1.02 | 0.19 | 0.32 | 0.14 | NA | NA | Yes | No |
| A882P | −0.12 | 0.14 | −0.11 | 0.13 | −0.12 | 0.24 | No | No |
| A882T | −0.14 | 0.09 | 0.05 | 0.09 | −0.09 | 0.13 | Yes | No |
| A882V | 0.39 | 0.08 | 0.04 | 0.08 | −0.17 | 0.15 | Yes | No |
| N883G | 0.42 | 0.08 | 0.37 | 0.08 | 0.03 | 0.11 | Yes | Yes |
| N883K | 0.12 | 0.16 | 0.23 | 0.16 | 0.16 | 0.10 | Yes | Yes |
| N883A | −0.26 | 0.15 | −1.10 | 0.17 | 0.05 | 0.55 | Yes | No |
| N883R | NA | NA | NA | NA | 0.84 | 0.11 | Yes | No |
| N883D | −0.02 | 0.13 | −0.37 | 0.14 | −0.36 | 0.18 | No | No |
| N883I | 0.00 | 0.16 | 0.08 | 0.15 | −0.37 | 0.12 | Yes | No |
| N883S | 0.08 | 0.10 | 0.04 | 0.10 | −0.13 | 0.09 | Yes | No |
| N883T | 0.27 | 0.11 | −0.02 | 0.11 | −0.21 | 0.12 | Yes | No |
| S884V | 0.05 | 0.11 | 0.61 | 0.10 | 0.03 | 0.14 | Yes | Yes |
| S884A | 0.07 | 0.13 | −0.01 | 0.12 | 0.02 | NA | Yes | No |
| S884R | −0.28 | 0.06 | −0.11 | 0.06 | 0.34 | 0.07 | Yes | No |
| S884N | 0.14 | 0.14 | 0.48 | 0.13 | −0.07 | 0.25 | Yes | No |
| S884C | NA | NA | NA | NA | 0.18 | 0.19 | Yes | No |
| S884E | −0.10 | 0.16 | −0.04 | 0.15 | NA | NA | Yes | No |
| S884G | −0.09 | 0.06 | −0.11 | 0.06 | 0.01 | 0.10 | Yes | No |
| S884L | NA | NA | NA | NA | 0.02 | 0.55 | Yes | No |
| S884T | −0.01 | 0.10 | 0.05 | 0.10 | NA | NA | Yes | No |
| S884W | −0.99 | 0.18 | −0.38 | 0.14 | 0.43 | 0.82 | Yes | No |
| P885A | −0.36 | 0.06 | −0.32 | 0.05 | −0.12 | 0.13 | No | No |
| P885R | −0.03 | 0.04 | −0.89 | 0.05 | 0.00 | 0.06 | Yes | No |
| P885N | −0.47 | 0.17 | −0.73 | 0.17 | NA | NA | Yes | No |
| P885D | −0.73 | 0.12 | −1.21 | 0.12 | −0.83 | 0.35 | No | No |
| P885C | −1.54 | 0.14 | −0.39 | 0.09 | −0.01 | 0.09 | No | No |
| P885Q | −1.26 | 0.18 | −0.04 | 0.13 | −0.65 | 0.33 | No | No |
| P885E | −0.08 | 0.08 | −1.01 | 0.09 | −0.98 | 0.16 | No | No |
| P885G | −1.22 | 0.05 | −0.98 | 0.04 | −0.39 | 0.04 | No | No |
| P885H | −0.06 | 0.13 | −0.41 | 0.13 | 0.09 | 0.12 | Yes | No |
| P885I | NA | NA | NA | NA | −0.01 | 0.44 | Yes | No |
| P885L | −0.66 | 0.07 | −0.90 | 0.07 | −0.60 | 0.05 | No | No |
| P885K | −0.12 | 0.12 | −0.28 | 0.12 | −0.32 | 0.22 | No | No |
| P885M | −1.32 | 0.15 | −1.01 | 0.13 | −0.52 | 0.13 | No | No |
| P885F | −0.98 | 0.16 | −0.49 | 0.14 | −0.31 | 0.10 | No | No |
| P885S | −0.88 | 0.07 | −0.65 | 0.06 | −0.11 | 0.12 | No | No |
| P885T | −0.35 | 0.04 | −0.29 | 0.04 | 0.03 | 0.05 | Yes | No |
| P885W | −0.76 | 0.07 | −1.20 | 0.08 | −0.94 | 0.23 | No | No |
| P885Y | −0.19 | 0.16 | 0.72 | 0.13 | 0.22 | 0.48 | Yes | No |
| P885V | −0.86 | 0.06 | −0.46 | 0.05 | 0.05 | 0.12 | Yes | No |
| S886L | 0.09 | 0.08 | 0.12 | 0.08 | 0.05 | 0.11 | Yes | Yes |
| S886M | 0.32 | 0.11 | 0.15 | 0.11 | 0.40 | 0.35 | Yes | Yes |
| S886W | 0.23 | 0.07 | 0.01 | 0.07 | 0.70 | 0.19 | Yes | Yes |
| S886A | −0.52 | 0.07 | −0.42 | 0.07 | −0.04 | 0.14 | No | No |
| S886R | 0.12 | 0.04 | −0.08 | 0.04 | 0.36 | 0.04 | Yes | No |
| S886N | 0.34 | 0.10 | −0.34 | 0.11 | −0.03 | 0.14 | Yes | No |
| S886D | 0.60 | 0.10 | −0.69 | 0.12 | NA | NA | Yes | No |
| S886C | 0.11 | 0.09 | −0.64 | 0.09 | 0.34 | 0.23 | Yes | No |
| S886Q | −0.33 | 0.14 | −0.65 | 0.14 | 0.19 | 0.64 | Yes | No |
| S886E | −0.60 | 0.10 | −0.56 | 0.10 | NA | NA | Yes | No |
| S886G | −0.20 | 0.04 | −0.18 | 0.04 | 0.10 | 0.05 | Yes | No |
| S886I | 0.89 | 0.13 | −0.13 | 0.14 | 0.07 | 0.29 | Yes | No |
| S886K | −0.70 | 0.14 | 0.01 | 0.12 | 0.56 | 0.12 | Yes | No |
| S886F | NA | NA | NA | NA | 0.75 | 0.44 | Yes | No |
| S886P | NA | NA | NA | NA | −0.28 | 0.14 | Yes | No |
| S886T | 0.07 | 0.07 | −0.05 | 0.07 | −0.29 | 0.10 | Yes | No |
| S886Y | NA | NA | NA | NA | 0.79 | 0.55 | Yes | No |
| S886V | −0.10 | 0.07 | −0.15 | 0.06 | 0.35 | 0.20 | Yes | No |
| K887A | 0.03 | 0.04 | −0.38 | 0.05 | −0.54 | 0.04 | Yes | No |
| K887R | −0.09 | 0.03 | −0.04 | 0.03 | 0.21 | 0.03 | Yes | No |
| K887N | 0.24 | 0.10 | 0.07 | 0.10 | −0.45 | 0.24 | Yes | No |
| K887D | −1.19 | 0.10 | −0.97 | 0.09 | −1.27 | 0.28 | No | No |
| K887C | −0.76 | 0.08 | 0.16 | 0.07 | −0.59 | 0.06 | Yes | No |
| K887Q | 0.10 | 0.08 | −0.05 | 0.07 | −0.25 | 0.11 | Yes | No |
| K887E | −0.33 | 0.05 | −0.39 | 0.05 | −0.97 | 0.06 | No | No |
| K887G | −0.14 | 0.03 | −0.22 | 0.02 | −0.42 | 0.03 | No | No |
| K887H | −0.04 | 0.12 | −1.21 | 0.15 | −0.21 | 0.40 | No | No |
| K887I | −0.31 | 0.12 | −0.04 | 0.11 | NA | NA | Yes | No |
| K887L | −0.88 | 0.06 | −0.67 | 0.05 | −0.68 | 0.07 | No | No |
| K887M | −0.12 | 0.07 | −0.23 | 0.07 | −0.44 | 0.16 | No | No |
| K887F | 0.22 | 0.11 | −0.22 | 0.11 | −0.74 | 0.25 | Yes | No |
| K887P | −0.29 | 0.08 | −0.61 | 0.08 | −0.32 | 0.18 | No | No |
| K887S | −0.03 | 0.05 | −0.50 | 0.05 | −0.66 | 0.08 | No | No |
| K887* | −0.88 | 0.08 | −1.30 | 0.08 | −1.22 | 0.10 | No | No |
| K887T | −0.79 | 0.08 | −0.22 | 0.07 | −0.74 | 0.11 | No | No |
| K887W | −0.59 | 0.05 | −0.69 | 0.05 | −0.65 | 0.07 | No | No |
| K887Y | 0.36 | 0.10 | −0.98 | 0.13 | −0.40 | 0.17 | Yes | No |
| K887V | 0.09 | 0.04 | −0.88 | 0.04 | −0.89 | 0.07 | Yes | No |
| F888A | −2.01 | 0.10 | −1.31 | 0.07 | −1.30 | 0.28 | No | No |
| F888R | −1.27 | 0.07 | −1.04 | 0.06 | −1.82 | 0.18 | No | No |
| F888D | −1.09 | 0.12 | −1.32 | 0.12 | NA | NA | Yes | No |
| F888C | 0.01 | 0.04 | −0.10 | 0.04 | 0.10 | 0.03 | Yes | No |
| F888Q | −0.58 | 0.13 | −1.37 | 0.15 | NA | NA | Yes | No |
| F888E | −0.89 | 0.08 | −2.09 | 0.11 | −1.77 | 0.12 | No | No |
| F888G | −1.75 | 0.05 | −1.53 | 0.05 | −1.57 | 0.03 | No | No |
| F888I | 0.09 | 0.11 | −0.24 | 0.11 | −0.50 | 0.15 | Yes | No |
| F888L | −0.13 | 0.04 | −0.06 | 0.03 | −0.23 | 0.05 | No | No |
| F888M | −0.65 | 0.12 | 0.31 | 0.10 | −0.04 | 0.10 | Yes | No |
| F888P | −0.69 | 0.12 | −1.56 | 0.15 | NA | NA | Yes | No |
| F888S | −1.42 | 0.08 | −1.17 | 0.07 | −1.14 | 0.12 | No | No |
| F888* | −1.06 | 0.13 | −0.77 | 0.11 | −1.31 | 0.08 | No | No |
| F888T | −0.62 | 0.11 | −1.69 | 0.13 | −1.19 | 0.64 | No | No |
| F888W | −1.15 | 0.08 | −2.14 | 0.11 | −1.37 | 0.05 | No | No |
| F888Y | −0.73 | 0.13 | −1.27 | 0.14 | −0.60 | 0.12 | No | No |
| F888V | 0.07 | 0.04 | 0.10 | 0.04 | −0.31 | 0.03 | Yes | No |
| N889A | NA | NA | NA | NA | −0.86 | 0.64 | Yes | No |
| N889R | −0.94 | 0.09 | −0.07 | 0.07 | −0.55 | 0.48 | No | No |
| N889D | −0.34 | 0.10 | −0.44 | 0.10 | −0.39 | 0.14 | No | No |
| N889G | −0.87 | 0.06 | −1.32 | 0.07 | −0.83 | 0.07 | No | No |
| N889I | −0.51 | 0.17 | −0.43 | 0.16 | NA | NA | Yes | No |
| N889K | −0.76 | 0.17 | −0.47 | 0.15 | −0.34 | 0.24 | No | No |
| N889S | −1.13 | 0.11 | 0.08 | 0.08 | −0.26 | 0.14 | Yes | No |
| N889T | −0.55 | 0.16 | −0.45 | 0.14 | −0.36 | 0.30 | No | No |
| N889V | −1.82 | 0.15 | −1.28 | 0.12 | −1.16 | 0.64 | No | No |
| Q890C | 0.03 | 0.11 | 0.64 | 0.10 | 0.08 | 0.54 | Yes | Yes |
| Q890H | 0.39 | 0.09 | 0.07 | 0.09 | 0.04 | 0.11 | Yes | Yes |
| Q890W | 0.03 | 0.08 | 0.23 | 0.07 | 0.03 | 0.08 | Yes | Yes |
| Q890A | 0.39 | 0.06 | 0.05 | 0.06 | −0.02 | 0.11 | Yes | No |
| Q890R | −0.10 | 0.05 | −0.24 | 0.05 | −0.05 | 0.10 | No | No |
| Q890N | −0.25 | 0.15 | −0.66 | 0.16 | 0.31 | NA | Yes | No |
| Q890D | 0.54 | 0.10 | −0.52 | 0.11 | −0.35 | 0.20 | Yes | No |
| Q890E | 0.17 | 0.06 | −0.62 | 0.07 | −0.33 | 0.06 | Yes | No |
| Q890G | −0.35 | 0.04 | −0.60 | 0.04 | −0.15 | 0.07 | No | No |
| Q890I | −0.26 | 0.16 | −0.94 | 0.18 | NA | NA | Yes | No |
| Q890L | 0.09 | 0.06 | −0.14 | 0.06 | 0.29 | 0.17 | Yes | No |
| Q890K | 0.23 | 0.10 | 0.25 | 0.10 | −0.22 | 0.16 | Yes | No |
| Q890M | 0.32 | 0.11 | −0.13 | 0.11 | −0.07 | 0.48 | Yes | No |
| Q890F | 0.25 | 0.15 | −0.11 | 0.15 | 0.09 | 0.82 | Yes | No |
| Q890P | −1.20 | 0.12 | −0.75 | 0.10 | −0.11 | 0.17 | No | No |
| Q890S | −0.58 | 0.08 | −0.01 | 0.07 | −0.19 | 0.08 | No | No |
| Q890* | −1.12 | 0.11 | −1.26 | 0.11 | −0.88 | 0.13 | No | No |
| Q890T | −0.36 | 0.10 | 0.11 | 0.09 | 0.08 | 0.09 | Yes | No |
| Q890Y | NA | NA | NA | NA | 0.03 | 0.13 | Yes | No |
| Q890V | −0.39 | 0.06 | −0.33 | 0.06 | 0.21 | 0.06 | Yes | No |
| R891A | −0.41 | 0.08 | −0.46 | 0.07 | −0.44 | 0.31 | No | No |
| R891D | −1.17 | 0.16 | −0.76 | 0.14 | −0.63 | 0.64 | No | No |
| R891C | −0.10 | 0.10 | −0.56 | 0.11 | −0.05 | 0.17 | No | No |
| R891Q | NA | NA | NA | NA | −0.08 | 0.64 | Yes | No |
| R891E | −1.06 | 0.11 | −0.65 | 0.09 | −0.59 | 0.64 | No | No |
| R891G | −0.70 | 0.04 | −0.40 | 0.04 | −0.11 | 0.04 | No | No |
| R891L | 0.07 | 0.08 | −0.02 | 0.08 | −0.25 | 0.33 | Yes | No |
| R891K | −0.04 | 0.11 | −0.37 | 0.11 | −0.03 | 0.26 | No | No |
| R891M | NA | NA | NA | NA | −0.14 | NA | Yes | No |
| R891S | −0.18 | 0.07 | −0.49 | 0.07 | −0.28 | 0.08 | No | No |
| R891* | −0.88 | 0.13 | −0.57 | 0.11 | −0.74 | 0.20 | No | No |
| R891T | −0.20 | 0.10 | −0.28 | 0.10 | −0.16 | 0.10 | No | No |
| R891W | −1.03 | 0.08 | −1.42 | 0.08 | −0.78 | 0.43 | No | No |
| R891V | −0.28 | 0.07 | −0.77 | 0.07 | −0.53 | 0.09 | No | No |
| V892A | −1.02 | 0.08 | −1.08 | 0.08 | −0.18 | 0.07 | No | No |
| V892R | −1.49 | 0.09 | −1.55 | 0.08 | −1.41 | 0.09 | No | No |
| V892C | −0.58 | 0.14 | −0.80 | 0.14 | −0.01 | 0.13 | No | No |
| V892E | −0.97 | 0.10 | −1.28 | 0.10 | −0.93 | 0.17 | No | No |
| V892G | −1.01 | 0.05 | −1.11 | 0.05 | −0.90 | 0.05 | No | No |
| V892L | −0.58 | 0.09 | −1.35 | 0.10 | −0.93 | 0.14 | No | No |
| V892M | −0.59 | 0.12 | −0.62 | 0.12 | NA | NA | Yes | No |
| V892S | −1.15 | 0.13 | −1.21 | 0.12 | NA | NA | Yes | No |
| V892T | −0.34 | 0.15 | 0.05 | 0.13 | 0.11 | 0.64 | Yes | No |
| V892W | −1.99 | 0.15 | −1.09 | 0.10 | NA | NA | Yes | No |
| N893A | −1.02 | 0.07 | −0.18 | 0.05 | −0.37 | 0.05 | No | No |
| N893R | −0.35 | 0.04 | −0.57 | 0.04 | −0.42 | 0.06 | No | No |
| N893D | −0.71 | 0.10 | −0.39 | 0.08 | −0.71 | 0.11 | No | No |
| N893C | −0.80 | 0.10 | −0.20 | 0.09 | −0.24 | 0.07 | No | No |
| N893Q | −1.58 | 0.15 | −0.86 | 0.11 | −0.57 | 0.20 | No | No |
| N893E | −0.89 | 0.07 | −1.03 | 0.07 | −1.10 | 0.10 | No | No |
| N893G | −0.30 | 0.03 | −0.68 | 0.03 | −0.34 | 0.04 | No | No |
| N893H | 0.02 | 0.13 | −0.74 | 0.14 | NA | NA | Yes | No |
| N893I | 0.33 | 0.11 | −0.24 | 0.12 | −0.68 | 0.11 | Yes | No |
| N893L | −1.03 | 0.08 | −0.46 | 0.07 | −0.86 | 0.17 | No | No |
| N893K | −0.39 | 0.07 | −0.07 | 0.06 | −0.27 | 0.07 | No | No |
| N893M | 0.26 | 0.08 | −0.81 | 0.10 | −1.04 | 0.33 | Yes | No |
| N893S | 0.64 | 0.05 | 0.08 | 0.05 | −0.47 | 0.06 | Yes | No |
| N893* | −1.54 | 0.12 | −1.43 | 0.11 | −1.26 | 0.17 | No | No |
| N893T | 1.09 | 0.06 | −0.04 | 0.06 | −0.62 | 0.08 | Yes | No |
| N893W | −0.63 | 0.06 | −0.48 | 0.06 | −0.78 | 0.10 | No | No |
| N893Y | −0.51 | 0.12 | −0.87 | 0.12 | −0.38 | 0.18 | No | No |
| N893V | −0.70 | 0.06 | −0.74 | 0.06 | −0.59 | 0.05 | No | No |
| A894R | 0.19 | 0.06 | 0.06 | 0.06 | 0.04 | 0.08 | Yes | Yes |
| A894D | 0.04 | 0.06 | 0.09 | 0.06 | 0.21 | 0.05 | Yes | Yes |
| A894C | −0.13 | 0.15 | −0.29 | 0.14 | NA | NA | Yes | No |
| A894Q | 0.87 | 0.14 | −0.47 | 0.16 | NA | NA | Yes | No |
| A894E | −0.35 | 0.10 | −0.85 | 0.10 | −0.45 | 0.20 | No | No |
| A894G | −0.47 | 0.05 | 0.09 | 0.05 | 0.21 | 0.06 | Yes | No |
| A894L | −0.45 | 0.11 | 0.57 | 0.09 | 0.08 | 0.12 | Yes | No |
| A894K | NA | NA | NA | NA | 0.27 | 0.15 | Yes | No |
| A894M | 0.14 | 0.13 | −0.17 | 0.13 | 0.25 | 0.18 | Yes | No |
| A894P | −0.67 | 0.14 | −1.05 | 0.15 | NA | NA | Yes | No |
| A894S | 0.57 | 0.08 | −0.97 | 0.10 | 0.12 | 0.23 | Yes | No |
| A894* | −0.76 | 0.19 | 0.06 | 0.16 | NA | NA | Yes | No |
| A894T | −0.68 | 0.10 | −0.49 | 0.09 | 0.21 | 0.15 | Yes | No |
| A894W | 0.67 | 0.09 | −0.44 | 0.10 | 0.02 | 0.54 | Yes | No |
| A894V | −0.22 | 0.07 | −0.05 | 0.06 | 0.12 | 0.18 | Yes | No |
| Y895D | 0.16 | 0.04 | 0.00 | 0.04 | 0.09 | 0.04 | Yes | Yes |
| Y895A | −1.08 | 0.12 | −0.85 | 0.11 | −0.53 | 0.37 | No | No |
| Y895R | NA | NA | NA | NA | −0.75 | 0.07 | Yes | No |
| Y895N | −0.12 | 0.11 | −0.43 | 0.11 | −0.07 | 0.23 | No | No |
| Y895C | 0.61 | 0.06 | 0.14 | 0.06 | −0.26 | 0.07 | Yes | No |
| Y895E | −0.53 | 0.11 | −0.74 | 0.10 | −0.62 | 0.13 | No | No |
| Y895G | −0.59 | 0.06 | −1.69 | 0.08 | −1.72 | 0.07 | No | No |
| Y895H | −0.21 | 0.10 | −0.10 | 0.10 | −0.25 | 0.16 | No | No |
| Y895F | 0.70 | 0.12 | −0.28 | 0.13 | −0.20 | 0.21 | Yes | No |
| Y895S | 0.18 | 0.05 | −0.17 | 0.05 | −0.12 | 0.06 | Yes | No |
| Y895* | −0.03 | 0.05 | −0.04 | 0.05 | 0.16 | 0.06 | Yes | No |
| Y895W | −0.08 | 0.11 | 0.17 | 0.10 | −0.18 | 0.31 | Yes | No |
| Y895V | −1.60 | 0.12 | −0.11 | 0.08 | −0.61 | 0.40 | No | No |
| L896A | −1.48 | 0.09 | −1.26 | 0.08 | −1.68 | 0.35 | No | No |
| L896R | 0.19 | 0.04 | −0.11 | 0.04 | −0.30 | 0.04 | Yes | No |
| L896Q | 0.42 | 0.04 | 0.08 | 0.04 | −0.17 | 0.05 | Yes | No |
| L896E | −1.31 | 0.11 | −1.65 | 0.12 | NA | NA | Yes | No |
| L896G | −2.17 | 0.07 | −1.66 | 0.05 | −1.77 | 0.05 | No | No |
| L896M | 0.31 | 0.11 | −0.22 | 0.11 | −0.74 | 0.17 | Yes | No |
| L896F | −0.69 | 0.18 | −0.97 | 0.18 | NA | NA | Yes | No |
| L896P | −0.37 | 0.08 | −0.52 | 0.08 | −0.53 | 0.10 | No | No |
| L896S | NA | NA | NA | NA | −1.38 | 0.48 | Yes | No |
| L896W | −1.69 | 0.12 | −1.64 | 0.11 | −0.97 | 0.54 | No | No |
| L896V | −0.04 | 0.06 | −0.69 | 0.06 | −0.81 | 0.07 | No | No |
| K897A | −0.76 | 0.08 | −0.22 | 0.07 | −0.07 | 0.15 | No | No |
| K897R | 0.03 | 0.04 | −0.01 | 0.04 | −0.05 | 0.05 | Yes | No |
| K897N | 0.58 | 0.11 | 0.26 | 0.11 | −0.06 | 0.09 | Yes | No |
| K897D | −1.39 | 0.13 | −0.61 | 0.10 | −0.10 | 0.25 | No | No |
| K897C | 0.02 | 0.09 | −0.54 | 0.10 | −0.11 | 0.08 | Yes | No |
| K897Q | −0.06 | 0.10 | 0.16 | 0.10 | −0.04 | 0.21 | Yes | No |
| K897E | 0.17 | 0.05 | −0.03 | 0.05 | −0.29 | 0.08 | Yes | No |
| K897G | 0.01 | 0.04 | −0.29 | 0.04 | −0.07 | 0.03 | Yes | No |
| K897H | −0.18 | 0.15 | 0.06 | 0.14 | 0.22 | 0.36 | Yes | No |
| K897I | −0.29 | 0.13 | −1.02 | 0.14 | −0.06 | 0.06 | No | No |
| K897L | −0.19 | 0.07 | −0.26 | 0.07 | 0.28 | 0.35 | Yes | No |
| K897M | −0.35 | 0.09 | −0.01 | 0.08 | 0.23 | 0.11 | Yes | No |
| K897F | −0.72 | 0.18 | 0.16 | 0.15 | −0.08 | 0.64 | Yes | No |
| K897P | −1.22 | 0.13 | −1.78 | 0.14 | NA | NA | Yes | No |
| K897S | −0.22 | 0.07 | −0.29 | 0.07 | −0.13 | 0.10 | No | No |
| K897* | −0.92 | 0.11 | −0.93 | 0.11 | −0.93 | 0.11 | No | No |
| K897T | 0.27 | 0.08 | −0.32 | 0.08 | −0.02 | 0.06 | Yes | No |
| K897W | −0.08 | 0.07 | −0.54 | 0.07 | 0.00 | 0.19 | No | No |
| K897Y | −0.95 | 0.19 | 0.19 | 0.14 | −0.23 | 0.13 | Yes | No |
| K897V | −0.30 | 0.05 | −0.29 | 0.05 | 0.19 | 0.07 | Yes | No |
| E898A | −0.19 | 0.06 | 0.08 | 0.06 | −0.25 | 0.07 | Yes | No |
| E898R | −0.44 | 0.07 | −0.49 | 0.07 | −0.10 | 0.31 | No | No |
| E898D | 0.42 | 0.10 | −0.32 | 0.11 | −0.12 | 0.16 | Yes | No |
| E898C | NA | NA | NA | NA | 0.23 | 0.15 | Yes | No |
| E898Q | −0.43 | 0.14 | −0.57 | 0.13 | 0.29 | 0.39 | Yes | No |
| E898G | −0.27 | 0.05 | −0.27 | 0.05 | 0.12 | 0.06 | Yes | No |
| E898L | 0.07 | 0.11 | −0.46 | 0.12 | 0.15 | 0.12 | Yes | No |
| E898K | −0.93 | 0.16 | −0.35 | 0.14 | 0.13 | 0.31 | Yes | No |
| E898P | −0.40 | 0.19 | −0.60 | 0.19 | NA | NA | Yes | No |
| E898S | 0.17 | 0.14 | −1.32 | 0.18 | 0.38 | 0.55 | Yes | No |
| E898W | −1.01 | 0.12 | −1.33 | 0.12 | −0.16 | 0.14 | No | No |
| E898V | −0.06 | 0.07 | 0.31 | 0.07 | 0.01 | 0.07 | Yes | No |
| H899A | 0.21 | 0.08 | 0.16 | 0.07 | 0.01 | 0.48 | Yes | Yes |
| H899N | 0.15 | 0.15 | 0.70 | 0.14 | 0.08 | 0.18 | Yes | Yes |
| H899R | −0.20 | 0.04 | −0.12 | 0.04 | −0.12 | 0.03 | No | No |
| H899D | −0.84 | 0.13 | −0.16 | 0.11 | −0.47 | 0.25 | No | No |
| H899C | −0.98 | 0.14 | −0.02 | 0.11 | −0.12 | 0.13 | No | No |
| H899Q | −0.15 | 0.05 | −0.20 | 0.05 | 0.00 | 0.03 | No | No |
| H899E | −0.85 | 0.10 | −0.64 | 0.09 | −0.36 | 0.27 | No | No |
| H899G | −0.79 | 0.05 | −0.96 | 0.05 | −0.65 | 0.05 | No | No |
| H899L | −0.27 | 0.08 | −0.41 | 0.08 | −0.50 | 0.14 | No | No |
| H899K | NA | NA | NA | NA | 0.05 | 0.49 | Yes | No |
| H899P | −0.07 | 0.07 | 0.01 | 0.07 | −0.33 | 0.10 | Yes | No |
| H899S | −0.31 | 0.10 | −0.33 | 0.09 | 0.07 | 0.32 | Yes | No |
| H899T | −0.37 | 0.15 | −0.14 | 0.14 | −0.03 | 0.48 | No | No |
| H899W | −0.32 | 0.08 | −0.24 | 0.07 | −0.25 | 0.48 | No | No |
| H899Y | −0.09 | 0.12 | −0.87 | 0.13 | 0.11 | 0.16 | Yes | No |
| H899V | −0.07 | 0.07 | −0.99 | 0.08 | 0.05 | 0.22 | Yes | No |
| P900A | −0.09 | 0.05 | 0.03 | 0.04 | 0.04 | 0.11 | Yes | No |
| P900R | −0.17 | 0.04 | −0.23 | 0.03 | 0.09 | 0.04 | Yes | No |
| P900N | −1.13 | 0.14 | 0.05 | 0.11 | 0.35 | 0.30 | Yes | No |
| P900D | −0.42 | 0.08 | −0.19 | 0.07 | 0.19 | 0.12 | Yes | No |
| P900C | −0.28 | 0.07 | 0.15 | 0.06 | 0.12 | 0.15 | Yes | No |
| P900Q | 0.28 | 0.08 | −0.19 | 0.09 | 0.23 | 0.30 | Yes | No |
| P900E | −0.19 | 0.06 | 0.18 | 0.05 | 0.29 | 0.08 | Yes | No |
| P900G | −0.03 | 0.03 | −0.15 | 0.03 | 0.11 | 0.03 | Yes | No |
| P900H | 0.07 | 0.08 | −0.18 | 0.08 | 0.25 | 0.12 | Yes | No |
| P900I | −0.83 | 0.12 | −0.36 | 0.10 | 0.33 | 0.33 | Yes | No |
| P900L | 0.03 | 0.04 | −0.20 | 0.04 | 0.07 | 0.04 | Yes | No |
| P900K | 0.16 | 0.08 | −0.61 | 0.08 | 0.05 | 0.13 | Yes | No |
| P900M | −1.26 | 0.10 | −0.21 | 0.07 | 0.06 | 0.12 | Yes | No |
| P900F | 0.33 | 0.10 | −0.07 | 0.10 | −0.19 | 0.09 | Yes | No |
| P900S | −0.10 | 0.05 | 0.15 | 0.04 | 0.14 | 0.04 | Yes | No |
| P900* | −0.32 | 0.08 | −1.30 | 0.10 | NA | NA | Yes | No |
| P900T | 0.24 | 0.06 | −0.22 | 0.06 | 0.19 | 0.09 | Yes | No |
| P900W | −0.16 | 0.05 | −0.48 | 0.06 | −0.04 | 0.06 | No | No |
| P900Y | −0.49 | 0.11 | −0.86 | 0.11 | −0.25 | 0.82 | No | No |
| P900V | 0.10 | 0.04 | −0.35 | 0.04 | 0.14 | 0.05 | Yes | No |
| E901D | 0.07 | 0.10 | 0.05 | 0.10 | 0.14 | 0.15 | Yes | Yes |
| E901A | −0.81 | 0.08 | 0.24 | 0.07 | 0.08 | 0.08 | Yes | No |
| E901R | −0.15 | 0.06 | −0.19 | 0.06 | −0.03 | 0.06 | No | No |
| E901C | −0.08 | 0.13 | −0.32 | 0.13 | 0.21 | 0.64 | Yes | No |
| E901Q | −0.69 | 0.16 | 0.04 | 0.13 | −0.16 | 0.40 | Yes | No |
| E901G | −0.44 | 0.04 | 0.07 | 0.04 | 0.10 | 0.06 | Yes | No |
| E901L | −0.12 | 0.08 | −0.80 | 0.09 | −0.13 | 0.20 | No | No |
| E901K | −0.11 | 0.10 | 0.20 | 0.10 | 0.08 | 0.13 | Yes | No |
| E901M | 0.16 | 0.12 | −0.14 | 0.12 | 0.03 | 0.82 | Yes | No |
| E901P | −0.99 | 0.19 | −1.23 | 0.19 | NA | NA | Yes | No |
| E901S | −1.40 | 0.13 | 0.16 | 0.08 | 0.05 | 0.11 | Yes | No |
| E901* | −0.29 | 0.13 | −1.11 | 0.15 | −0.63 | 0.14 | No | No |
| E901T | NA | NA | NA | NA | −0.05 | 0.44 | Yes | No |
| E901W | 0.02 | 0.08 | −0.49 | 0.09 | 0.21 | 0.08 | Yes | No |
| E901V | −1.13 | 0.07 | −0.49 | 0.06 | 0.11 | 0.06 | Yes | No |
| T902A | −0.07 | 0.05 | −0.35 | 0.05 | −0.20 | 0.09 | No | No |
| T902R | −0.60 | 0.06 | −1.09 | 0.07 | −0.48 | 0.12 | No | No |
| T902C | 0.17 | 0.11 | −0.55 | 0.12 | −0.25 | 0.82 | Yes | No |
| T902Q | −0.92 | 0.15 | −0.24 | 0.13 | NA | NA | Yes | No |
| T902E | −0.55 | 0.10 | −1.12 | 0.11 | NA | NA | Yes | No |
| T902G | −1.03 | 0.06 | −1.00 | 0.06 | −0.74 | 0.15 | No | No |
| T902I | −0.22 | 0.14 | 0.19 | 0.12 | −0.10 | 0.20 | Yes | No |
| T902L | −0.92 | 0.11 | −0.09 | 0.09 | −0.12 | 0.09 | No | No |
| T902K | −0.31 | 0.04 | −0.01 | 0.04 | 0.13 | 0.06 | Yes | No |
| T902M | NA | NA | NA | NA | 0.01 | 0.54 | Yes | No |
| T902P | −1.06 | 0.13 | −0.32 | 0.10 | −0.81 | 0.21 | No | No |
| T902S | −0.15 | 0.07 | −0.38 | 0.07 | −0.15 | 0.07 | No | No |
| T902W | NA | NA | NA | NA | −0.80 | 0.54 | Yes | No |
| T902V | −0.15 | 0.07 | 0.06 | 0.07 | −0.03 | 0.14 | Yes | No |
| P903T | 0.64 | 0.13 | 0.52 | 0.12 | 0.39 | 0.18 | Yes | Yes |
| P903A | −0.22 | 0.11 | −0.37 | 0.10 | −0.12 | 0.31 | No | No |
| P903R | −1.86 | 0.13 | −0.87 | 0.09 | −0.31 | 0.27 | No | No |
| P903C | 0.75 | 0.15 | −0.71 | 0.18 | NA | NA | Yes | No |
| P903E | NA | NA | NA | NA | 0.05 | 0.22 | Yes | No |
| P903G | −1.37 | 0.10 | −1.66 | 0.10 | −0.49 | 0.35 | No | No |
| P903H | NA | NA | NA | NA | 0.04 | 0.17 | Yes | No |
| P903L | −0.52 | 0.11 | −0.93 | 0.12 | 0.29 | 0.10 | Yes | No |
| P903S | −0.61 | 0.12 | 0.03 | 0.10 | 0.07 | 0.22 | Yes | No |
| P903V | −0.44 | 0.12 | −0.77 | 0.12 | 0.25 | 0.16 | Yes | No |
| I904A | 0.28 | 0.05 | 0.32 | 0.05 | −0.01 | 0.10 | Yes | No |
| I904R | −0.52 | 0.05 | −0.28 | 0.04 | −0.14 | 0.04 | No | No |
| I904N | −0.26 | 0.11 | 0.07 | 0.10 | −0.29 | 0.13 | Yes | No |
| I904D | NA | NA | NA | NA | −1.33 | 0.37 | Yes | No |
| I904C | −0.37 | 0.09 | −0.06 | 0.08 | 0.16 | 0.09 | Yes | No |
| I904Q | −0.28 | 0.11 | 0.17 | 0.10 | 0.03 | 0.37 | Yes | No |
| I904E | −1.15 | 0.08 | −1.73 | 0.09 | −0.77 | 0.30 | No | No |
| I904G | −1.05 | 0.04 | −0.45 | 0.04 | −0.39 | 0.03 | No | No |
| I904H | NA | NA | NA | NA | −0.20 | 0.48 | Yes | No |
| I904L | −0.35 | 0.07 | 0.47 | 0.06 | 0.12 | 0.09 | Yes | No |
| I904K | −1.71 | 0.15 | −0.48 | 0.10 | 0.05 | 0.09 | Yes | No |
| I904M | 0.19 | 0.08 | −0.04 | 0.08 | 0.03 | 0.05 | Yes | No |
| I904F | −0.71 | 0.13 | 0.38 | 0.11 | 0.15 | 0.20 | Yes | No |
| I904S | 0.20 | 0.04 | −0.09 | 0.04 | 0.07 | 0.03 | Yes | No |
| I904* | −1.37 | 0.12 | −1.64 | 0.13 | NA | NA | Yes | No |
| I904T | 0.33 | 0.07 | −0.20 | 0.07 | −0.13 | 0.08 | Yes | No |
| I904W | −0.01 | 0.06 | −0.07 | 0.06 | −0.35 | 0.24 | No | No |
| I904Y | 0.53 | 0.12 | −0.47 | 0.13 | 0.01 | 0.64 | Yes | No |
| I904V | −0.13 | 0.05 | 0.08 | 0.04 | 0.00 | 0.04 | Yes | No |
| I905A | −0.31 | 0.06 | −0.49 | 0.06 | −0.02 | 0.14 | No | No |
| I905R | −1.93 | 0.08 | −1.23 | 0.06 | −1.47 | 0.09 | No | No |
| I905N | −0.95 | 0.15 | −0.68 | 0.14 | NA | NA | Yes | No |
| I905D | −1.69 | 0.14 | −1.47 | 0.12 | NA | NA | Yes | No |
| I905C | −0.01 | 0.10 | 0.49 | 0.09 | −0.12 | 0.11 | Yes | No |
| I905E | −1.48 | 0.10 | −2.09 | 0.12 | −1.57 | 0.43 | No | No |
| I905G | −1.25 | 0.05 | −0.83 | 0.04 | −0.80 | 0.04 | No | No |
| I905L | −0.65 | 0.07 | −0.31 | 0.06 | −0.12 | 0.07 | No | No |
| I905M | 0.15 | 0.06 | −0.40 | 0.07 | −0.10 | 0.06 | Yes | No |
| I905F | −0.10 | 0.11 | −0.09 | 0.11 | −0.55 | 0.18 | No | No |
| I905S | −1.01 | 0.07 | −1.06 | 0.07 | −0.63 | 0.06 | No | No |
| I905T | −0.17 | 0.09 | −0.86 | 0.09 | −0.52 | 0.12 | No | No |
| I905W | −1.31 | 0.10 | −1.78 | 0.11 | −1.43 | 0.28 | No | No |
| I905V | −0.18 | 0.05 | −0.21 | 0.05 | 0.10 | 0.06 | Yes | No |
| G906A | 0.41 | 0.05 | 0.56 | 0.04 | 0.42 | 0.05 | Yes | Yes |
| G906S | 0.40 | 0.05 | 0.16 | 0.05 | 0.15 | 0.06 | Yes | Yes |
| G906R | −1.82 | 0.06 | −2.39 | 0.07 | −1.63 | 0.08 | No | No |
| G906D | −1.49 | 0.10 | −1.05 | 0.08 | −1.38 | 0.18 | No | No |
| G906C | −1.50 | 0.11 | −1.21 | 0.09 | −1.62 | 0.11 | No | No |
| G906E | −2.26 | 0.12 | −1.63 | 0.09 | −1.49 | 0.11 | No | No |
| G906L | −1.51 | 0.09 | −2.32 | 0.11 | −1.69 | 0.27 | No | No |
| G906P | −1.68 | 0.12 | −1.05 | 0.09 | −1.66 | 0.10 | No | No |
| G906* | NA | NA | NA | NA | −1.21 | 0.40 | Yes | No |
| G906T | −1.69 | 0.11 | −2.68 | 0.15 | NA | NA | Yes | No |
| G906W | −2.22 | 0.11 | −1.14 | 0.07 | −1.71 | 0.08 | No | No |
| G906V | −0.85 | 0.05 | −1.20 | 0.05 | −1.27 | 0.06 | No | No |
| I907A | 0.70 | 0.10 | 0.42 | 0.10 | 0.27 | 0.54 | Yes | Yes |
| I907V | 0.15 | 0.07 | 0.12 | 0.07 | 0.13 | 0.06 | Yes | Yes |
| I907R | −0.92 | 0.08 | −1.15 | 0.08 | −0.89 | 0.09 | No | No |
| I907D | −0.44 | 0.17 | −0.97 | 0.18 | NA | NA | Yes | No |
| I907C | −0.16 | 0.16 | 0.84 | 0.13 | 0.12 | 0.64 | Yes | No |
| I907E | −1.06 | 0.15 | −0.42 | 0.12 | NA | NA | Yes | No |
| I907G | −0.42 | 0.06 | −0.40 | 0.06 | −0.03 | 0.06 | No | No |
| I907L | 0.34 | 0.09 | 0.24 | 0.08 | −0.33 | 0.09 | Yes | No |
| I907M | NA | NA | NA | NA | 0.12 | 0.25 | Yes | No |
| I907F | −0.50 | 0.19 | −0.17 | 0.17 | NA | NA | Yes | No |
| I907S | −0.29 | 0.03 | −0.18 | 0.03 | 0.25 | 0.03 | Yes | No |
| I907T | −0.44 | 0.15 | 0.78 | 0.12 | 0.28 | 0.12 | Yes | No |
| D908A | −2.26 | 0.13 | −1.92 | 0.11 | −1.10 | 0.16 | No | No |
| D908R | NA | NA | NA | NA | −1.53 | 0.09 | Yes | No |
| D908N | −0.27 | 0.12 | −0.30 | 0.12 | −0.70 | 0.14 | No | No |
| D908E | −1.61 | 0.13 | −1.42 | 0.11 | −1.11 | 0.11 | No | No |
| D908G | −2.25 | 0.09 | −2.15 | 0.08 | −1.77 | 0.14 | No | No |
| D908S | −1.92 | 0.16 | −1.78 | 0.14 | NA | NA | Yes | No |
| D908W | −1.93 | 0.15 | −2.11 | 0.15 | NA | NA | Yes | No |
| D908Y | 0.26 | 0.11 | −0.07 | 0.12 | −0.15 | 0.12 | Yes | No |
| D908V | −1.74 | 0.10 | −1.76 | 0.10 | −1.52 | 0.09 | No | No |
| R909A | NA | NA | NA | NA | −1.45 | 0.37 | Yes | No |
| R909Q | −0.25 | 0.18 | −0.94 | 0.20 | NA | NA | Yes | No |
| R909G | −1.30 | 0.05 | −1.49 | 0.05 | −1.38 | 0.06 | No | No |
| R909K | −0.87 | 0.16 | −0.60 | 0.14 | NA | NA | Yes | No |
| R909S | −1.08 | 0.10 | −0.84 | 0.09 | −0.58 | 0.12 | No | No |
| R909T | −1.28 | 0.15 | −0.89 | 0.13 | NA | NA | Yes | No |
| R909W | −0.96 | 0.10 | −1.94 | 0.13 | NA | NA | Yes | No |
| R909V | −1.36 | 0.11 | −2.33 | 0.14 | −1.34 | 0.47 | No | No |
| G910R | −1.03 | 0.08 | −1.62 | 0.09 | −1.75 | 0.16 | No | No |
| G910D | NA | NA | NA | NA | −0.69 | 0.19 | Yes | No |
| G910C | −0.91 | 0.13 | −1.29 | 0.14 | NA | NA | Yes | No |
| G910S | −1.15 | 0.10 | −1.28 | 0.10 | −1.41 | 0.19 | No | No |
| G910W | −1.93 | 0.15 | −1.82 | 0.13 | NA | NA | Yes | No |
| G910V | −1.34 | 0.08 | −1.15 | 0.07 | −0.66 | 0.13 | No | No |
| E911A | −0.79 | 0.12 | −1.56 | 0.14 | −0.93 | 0.10 | No | No |
| E911R | −1.42 | 0.12 | −2.19 | 0.14 | NA | NA | Yes | No |
| E911D | −0.45 | 0.14 | −0.47 | 0.13 | −0.18 | 0.25 | No | No |
| E911G | −0.65 | 0.06 | −0.80 | 0.06 | −0.83 | 0.08 | No | No |
| E911L | NA | NA | NA | NA | −0.50 | 0.15 | Yes | No |
| E911K | −0.39 | 0.13 | −0.14 | 0.12 | −0.57 | 0.15 | No | No |
| E911* | −0.20 | 0.11 | 0.12 | 0.10 | −0.18 | 0.16 | Yes | No |
| E911V | −0.21 | 0.08 | −0.62 | 0.08 | −0.61 | 0.09 | No | No |
| R912A | 0.46 | 0.09 | 0.49 | 0.09 | 0.31 | 0.64 | Yes | Yes |
| R912L | 0.53 | 0.08 | 0.38 | 0.08 | 0.21 | 0.16 | Yes | Yes |
| R912S | 1.04 | 0.11 | 0.30 | 0.11 | 0.31 | 0.54 | Yes | Yes |
| R912V | 0.19 | 0.09 | 0.23 | 0.09 | 0.03 | 0.09 | Yes | Yes |
| R912C | 0.43 | 0.15 | 0.54 | 0.15 | −0.29 | 0.16 | Yes | No |
| R912Q | 0.22 | 0.05 | 0.15 | 0.05 | −0.05 | 0.09 | Yes | No |
| R912E | 0.53 | 0.12 | −0.67 | 0.14 | NA | NA | Yes | No |
| R912G | −0.21 | 0.05 | −1.04 | 0.06 | −0.56 | 0.05 | No | No |
| R912P | 0.53 | 0.09 | 0.79 | 0.09 | −0.40 | 0.14 | Yes | No |
| R912T | −0.54 | 0.17 | −0.07 | 0.15 | 0.52 | 0.65 | Yes | No |
| R912W | −0.09 | 0.07 | −0.14 | 0.07 | −0.43 | 0.10 | No | No |
| N913A | −1.19 | 0.13 | −0.97 | 0.11 | −0.87 | 0.33 | No | No |
| N913R | −2.49 | 0.14 | −0.64 | 0.07 | −1.67 | 0.40 | No | No |
| N913D | −0.62 | 0.13 | −0.44 | 0.12 | −0.75 | 0.10 | No | No |
| N913E | −0.91 | 0.12 | −1.92 | 0.16 | NA | NA | Yes | No |
| N913G | −1.34 | 0.07 | −0.91 | 0.06 | −1.56 | 0.30 | No | No |
| N913H | 0.12 | 0.07 | 0.13 | 0.07 | −0.20 | 0.12 | Yes | No |
| N913I | −0.16 | 0.09 | −0.18 | 0.09 | −0.18 | 0.12 | No | No |
| N913L | −0.39 | 0.11 | −0.72 | 0.11 | NA | NA | Yes | No |
| N913K | −0.37 | 0.05 | −0.29 | 0.04 | −0.27 | 0.08 | No | No |
| N913S | −0.29 | 0.08 | −0.06 | 0.07 | −0.20 | 0.12 | No | No |
| N913T | 0.09 | 0.11 | −0.67 | 0.12 | −0.35 | 0.24 | Yes | No |
| N913Y | −0.47 | 0.18 | −0.44 | 0.17 | NA | NA | Yes | No |
| N913V | −1.32 | 0.12 | −0.89 | 0.10 | −1.09 | 0.18 | No | No |
| ¹Key to Header abbreviations: Mutants are defined by single letter amino acid (wild-type) at a given position in the wild-type AsCas12a polypeptide (e.g., amino acid position 500), followed by the variant amino acid change thereafter; “Enrich. Score (1)” refers to Enrichment score of the variant in a Condition 1 background; “Stand. Error (1) refers to the Standard error for experiments conducted for a given variant in a Condition 1 background; “Enrich. Score (2)” refers to Enrichment Score of the variant in a Condition 2 background; “Stand. Error (2) refers to the Standard Error for experiments conducted for a given variant in a Condition 2 background; “Enrich. Score (3)”refers to Enrichment Score of the variant in a Condition 3 background; “Stand. Error (3) refers to the Standard Error for experiments conducted for a given variant in a Condition 3 background; “Any Positive Enrichment?” refers to the occurrence of positive enrichment for a given variant under at least one experimental Condition background; “Consistent positive enrichment?” refers to the occurrence of positive enrichment for a given variant under all tested experimental Condition | | | | | | | | |
| backgrounds. | | | | | | | | |

[0106] One hundred eighty-seven (187) variants (˜6% of total) consistently enhanced the survival rate under all conditions (Table 4). These variants, including the four validated individually, can be stacked on the WT- or M537R/F870L-AsCas12a, to boost its DNA cleavage activity at TTTT-PAM.

TABLE 4
Point mutations consistently enriched over the reference proteins
under all conditions.¹

| SEQ ID | | | Variant score | Variant score | Variant score |
|---|---|---|---|---|---|
| NO.: | Mutant | Position | (condition 1) | (condition 2) | (condition 3) |
| 59 | R499C | 499 | 0.14 ± 0.08 | 0.6 ± 0.07 | 0.06 ± 0.1 |
| 60 | R499L | 499 | 0.08 ± 0.05 | 0.05 ± 0.06 | 0.09 ± 0.15 |
| 61 | R499K | 499 | 0.54 ± 0.06 | 0.23 ± 0.06 | 0.38 ± 0.1 |
| 62 | L500M | 500 | 0.01 ± 0.05 | 0.3 ± 0.05 | 0.28 ± 0.12 |
| 63 | T501L | 501 | 0.18 ± 0.04 | 0.32 ± 0.04 | 0.12 ± 0.07 |
| 64 | T501M | 501 | 0.32 ± 0.07 | 0.35 ± 0.07 | 0.17 ± 0.29 |
| 65 | T501V | 501 | 0.22 ± 0.06 | 0.29 ± 0.06 | 0.13 ± 0.2 |
| 66 | G502R | 502 | 0.14 ± 0.05 | 0.28 ± 0.05 | 0.98 ± 0.07 |
| 67 | G502E | 502 | 0.42 ± 0.08 | 0.17 ± 0.08 | 0.19 ± 0.3 |
| 68 | G502L | 502 | 0.45 ± 0.07 | 0.1 ± 0.07 | 0 ± 0.11 |
| 69 | G502S | 502 | 0.08 ± 0.06 | 0.23 ± 0.06 | 0.16 ± 0.12 |
| 70 | G502W | 502 | 0.14 ± 0.07 | 0.65 ± 0.06 | 0.36 ± 0.14 |
| 71 | G502V | 502 | 0.21 ± 0.05 | 0.21 ± 0.05 | 0.13 ± 0.07 |
| 72 | L505A | 505 | 0.61 ± 0.05 | 0.5 ± 0.05 | 0.47 ± 0.13 |
| 73 | L505R | 505 | 0.4 ± 0.03 | 0.56 ± 0.03 | 0.81 ± 0.05 |
| 74 | L505Q | 505 | 0.3 ± 0.07 | 0.82 ± 0.07 | 0.16 ± 0.11 |
| 75 | L505E | 505 | 0.18 ± 0.06 | 0.03 ± 0.07 | 0.14 ± 0.21 |
| 76 | L505G | 505 | 0.18 ± 0.03 | 0.72 ± 0.03 | 0.4 ± 0.05 |
| 77 | L505H | 505 | 0.33 ± 0.11 | 0.83 ± 0.1 | 0.34 ± 0.32 |
| 78 | L505K | 505 | 0.02 ± 0.1 | 1 ± 0.08 | 1 ± 0.13 |
| 79 | L505S | 505 | 0.13 ± 0.06 | 0.32 ± 0.06 | 0.6 ± 0.07 |
| 80 | E506A | 506 | 0.33 ± 0.03 | 0.47 ± 0.03 | 0.7 ± 0.05 |
| 81 | E506R | 506 | 0.46 ± 0.03 | 0.81 ± 0.03 | 1.2 ± 0.04 |
| 82 | E506N | 506 | 0.24 ± 0.09 | 0.53 ± 0.09 | 0.5 ± 0.29 |
| 83 | E506C | 506 | 0.2 ± 0.06 | 0.29 ± 0.06 | 0.49 ± 0.19 |
| 84 | E506Q | 506 | 0.09 ± 0.07 | 0.74 ± 0.06 | 0.33 ± 0.15 |
| 85 | E506G | 506 | 0.24 ± 0.02 | 0.39 ± 0.02 | 0.53 ± 0.03 |
| 86 | E506H | 506 | 0.35 ± 0.09 | 0.1 ± 0.1 | 0.98 ± 0.31 |
| 87 | E5061 | 506 | 0.47 ± 0.09 | 0.45 ± 0.09 | 0.69 ± 0.13 |
| 88 | E506L | 506 | 0.3 ± 0.04 | 0.61 ± 0.04 | 0.56 ± 0.07 |
| 89 | E506K | 506 | 0.18 ± 0.06 | 0.59 ± 0.05 | 1.08 ± 0.08 |
| 90 | E506M | 506 | 0.53 ± 0.06 | 0.28 ± 0.07 | 0.47 ± 0.17 |
| 91 | E506S | 506 | 0.01 ± 0.05 | 0.47 ± 0.04 | 0.5 ± 0.06 |
| 92 | E506T | 506 | 0.39 ± 0.06 | 0.12 ± 0.07 | 0.9 ± 0.23 |
| 93 | E506Y | 506 | 0.16 ± 0.09 | 0.29 ± 0.09 | 0.43 ± 0.25 |
| 94 | E506V | 506 | 0.45 ± 0.03 | 0.51 ± 0.03 | 0.75 ± 0.05 |
| 95 | E508A | 508 | 0.36 ± 0.03 | 0.2 ± 0.03 | 0.18 ± 0.06 |
| 96 | E508R | 508 | 0.54 ± 0.03 | 0.8 ± 0.03 | 0.82 ± 0.06 |
| 97 | E508Q | 508 | 0.25 ± 0.06 | 0.11 ± 0.07 | 0.51 ± 0.13 |
| 98 | E508G | 508 | 0.16 ± 0.02 | 0.17 ± 0.02 | 0.22 ± 0.04 |
| 99 | E508L | 508 | 0.03 ± 0.04 | 0.1 ± 0.04 | 0.26 ± 0.11 |
| 100 | E508K | 508 | 0.2 ± 0.06 | 0.49 ± 0.06 | 0.66 ± 0.08 |
| 101 | E508M | 508 | 0.25 ± 0.07 | 0.57 ± 0.06 | 0.54 ± 0.11 |
| 102 | E508F | 508 | 0.27 ± 0.08 | 0.19 ± 0.08 | 0.39 ± 0.29 |
| 103 | E508S | 508 | 0.31 ± 0.05 | 0.62 ± 0.04 | 0.34 ± 0.06 |
| 104 | E508T | 508 | 0.19 ± 0.06 | 0.73 ± 0.06 | 0.55 ± 0.1 |
| 105 | E508Y | 508 | 0.35 ± 0.09 | 0.19 ± 0.1 | 0.21 ± 0.27 |
| 106 | E508V | 508 | 0.16 ± 0.03 | 0.22 ± 0.03 | 0.34 ± 0.05 |
| 107 | P509R | 509 | 0.23 ± 0.03 | 0.27 ± 0.03 | 1.04 ± 0.05 |
| 108 | P509K | 509 | 0.01 ± 0.07 | 0.12 ± 0.07 | 1.29 ± 0.13 |
| 109 | P509M | 509 | 0.34 ± 0.07 | 0.34 ± 0.07 | 0.1 ± 0.22 |
| 110 | P509S | 509 | 0.1 ± 0.04 | 0.14 ± 0.04 | 0.14 ± 0.1 |
| 111 | P509W | 509 | 0.04 ± 0.05 | 0.33 ± 0.05 | 0.61 ± 0.18 |
| 112 | P509Y | 509 | 0.18 ± 0.09 | 0.2 ± 0.09 | 0.53 ± 0.3 |
| 113 | S510G | 510 | 0.18 ± 0.03 | 0.49 ± 0.03 | 0.21 ± 0.06 |
| 114 | S510L | 510 | 0.57 ± 0.06 | 0.72 ± 0.06 | 0.74 ± 0.09 |
| 115 | S512R | 512 | 0.07 ± 0.07 | 0.34 ± 0.07 | 0.07 ± 0.19 |
| 116 | F513L | 513 | 0.53 ± 0.04 | 0.63 ± 0.04 | 0.41 ± 0.07 |
| 117 | F513W | 513 | 0.04 ± 0.06 | 0.35 ± 0.06 | 0.28 ± 0.13 |
| 118 | N515A | 515 | 0.6 ± 0.06 | 0.82 ± 0.06 | 0.12 ± 0.11 |
| 119 | N515R | 515 | 0.63 ± 0.06 | 0.82 ± 0.05 | 0.19 ± 0.11 |
| 120 | N5151 | 515 | 0.23 ± 0.07 | 0.3 ± 0.07 | 0.16 ± 0.14 |
| 121 | N515L | 515 | 0.33 ± 0.06 | 0.53 ± 0.06 | 0.07 ± 0.2 |
| 122 | N515T | 515 | 0.41 ± 0.08 | 0.14 ± 0.08 | 0.29 ± 0.16 |
| 123 | N515V | 515 | 0.5 ± 0.05 | 0.49 ± 0.05 | 0.45 ± 0.09 |
| 124 | K516R | 516 | 0.01 ± 0.03 | 0.26 ± 0.03 | 0.4 ± 0.06 |
| 125 | R518K | 518 | 0.2 ± 0.09 | 0.72 ± 0.08 | 0.05 ± 0.17 |
| 126 | T522L | 522 | 1.1 ± 0.05 | 0.92 ± 0.05 | 0.28 ± 0.1 |
| 127 | T522M | 522 | 0.92 ± 0.07 | 0.81 ± 0.08 | 0.53 ± 0.21 |
| 128 | T522V | 522 | 0.16 ± 0.05 | 0.28 ± 0.05 | 0.04 ± 0.07 |
| 129 | K523R | 523 | 0.17 ± 0.02 | 0.37 ± 0.02 | 0 ± 0.03 |
| 130 | S527D | 527 | 0.13 ± 0.11 | 0.01 ± 0.11 | 0.34 ± 0.41 |
| 131 | V528D | 528 | 0.01 ± 0.07 | 0.27 ± 0.07 | 0.12 ± 0.12 |
| 132 | V528L | 528 | 0.55 ± 0.03 | 0.59 ± 0.03 | 0.31 ± 0.07 |
| 133 | V528M | 528 | 0.19 ± 0.05 | 0.02 ± 0.05 | 0.13 ± 0.1 |
| 134 | S542N | 542 | 0.24 ± 0.09 | 0.02 ± 0.09 | 0.29 ± 0.07 |
| 135 | S542C | 542 | 0.03 ± 0.17 | 0.15 ± 0.17 | 0.42 ± 0.16 |
| 136 | K550R | 550 | 0.05 ± 0.03 | 0.18 ± 0.03 | 0.17 ± 0.07 |
| 137 | N551D | 551 | 0.14 ± 0.04 | 0.15 ± 0.04 | 0.67 ± 0.07 |
| 138 | A5541 | 554 | 0.15 ± 0.09 | 0.71 ± 0.08 | 0.39 ± 0.34 |
| 139 | A554T | 554 | 0.45 ± 0.04 | 0.32 ± 0.05 | 0.93 ± 0.07 |
| 140 | A554V | 554 | 0.57 ± 0.03 | 0.48 ± 0.03 | 0.54 ± 0.04 |
| 141 | I555V | 555 | 0.41 ± 0.03 | 0.13 ± 0.03 | 0.14 ± 0.06 |
| 142 | L556M | 556 | 0.08 ± 0.08 | 0.1 ± 0.08 | 0.11 ± 0.21 |
| 143 | V558M | 558 | 0.24 ± 0.06 | 0.15 ± 0.06 | 0.1 ± 0.12 |
| 144 | K559A | 559 | 0.17 ± 0.04 | 0.08 ± 0.04 | 0.13 ± 0.08 |
| 145 | N560A | 560 | 0.34 ± 0.05 | 0.18 ± 0.05 | 0.18 ± 0.08 |
| 146 | N560D | 560 | 0.16 ± 0.04 | 0.18 ± 0.04 | 0.16 ± 0.08 |
| 147 | N560E | 560 | 0.48 ± 0.06 | 0.28 ± 0.06 | 0.11 ± 0.25 |
| 148 | N560M | 560 | 0.16 ± 0.09 | 0.31 ± 0.09 | 0.18 ± 0.13 |
| 149 | P569D | 569 | 0.6 ± 0.08 | 0.33 ± 0.08 | 1.25 ± 0.11 |
| 150 | Q571A | 571 | 0.64 ± 0.07 | 0.39 ± 0.08 | 1.09 ± 0.23 |
| 151 | Q571P | 571 | 0.17 ± 0.07 | 0.61 ± 0.07 | 0.13 ± 0.14 |
| 152 | Q571S | 571 | 0.25 ± 0.09 | 0.2 ± 0.09 | 0.89 ± 0.23 |
| 153 | Q571T | 571 | 0.22 ± 0.13 | 0.19 ± 0.13 | 0.87 ± 0.41 |
| 154 | K572E | 572 | 0.11 ± 0.04 | 0.25 ± 0.04 | 0.42 ± 0.08 |
| 155 | Y575G | 575 | 0.53 ± 0.04 | 0.21 ± 0.04 | 0.32 ± 0.07 |
| 156 | Y575M | 575 | 0.89 ± 0.11 | 0.27 ± 0.12 | 0.31 ± 0.41 |
| 157 | K576C | 576 | 0.27 ± 0.07 | 0.25 ± 0.07 | 0.1 ± 0.26 |
| 158 | S579T | 579 | 0.17 ± 0.04 | 0.33 ± 0.04 | 0.01 ± 0.06 |
| 159 | S579V | 579 | 0.04 ± 0.03 | 0.02 ± 0.03 | 0.05 ± 0.07 |
| 160 | T5831 | 583 | 0.04 ± 0.08 | 0.11 ± 0.07 | 0.07 ± 0.17 |
| 161 | E584H | 584 | 0.09 ± 0.07 | 0.22 ± 0.07 | 0.17 ± 0.14 |
| 162 | E584V | 584 | 0.1 ± 0.03 | 0.06 ± 0.03 | 0.12 ± 0.04 |
| 163 | K585R | 585 | 0.07 ± 0.03 | 0.32 ± 0.03 | 0.06 ± 0.05 |
| 164 | K585F | 585 | 0.51 ± 0.09 | 0.04 ± 0.09 | 0.61 ± 0.36 |
| 165 | D596E | 596 | 0.04 ± 0.04 | 0.24 ± 0.04 | 0.69 ± 0.05 |
| 166 | P599G | 599 | 0.84 ± 0.04 | 0.83 ± 0.04 | 1.01 ± 0.05 |
| 167 | A602C | 602 | 0.64 ± 0.09 | 0.61 ± 0.09 | 0.73 ± 0.28 |
| 168 | L612M | 612 | 0.7 ± 0.07 | 0.7 ± 0.07 | 0.01 ± 0.03 |
| 169 | A614R | 614 | 0.28 ± 0.04 | 0.07 ± 0.05 | 0.16 ± 0.05 |
| 170 | A6141 | 614 | 0.52 ± 0.11 | 0.59 ± 0.11 | 0.41 ± 0.22 |
| 171 | T616A | 616 | 0.32 ± 0.03 | 0.24 ± 0.04 | 0.09 ± 0.05 |
| 172 | T616R | 616 | 0.19 ± 0.03 | 0.12 ± 0.03 | 0.62 ± 0.04 |
| 173 | T616Q | 616 | 0.35 ± 0.07 | 0.38 ± 0.07 | 0.78 ± 0.2 |
| 174 | T616G | 616 | 0.22 ± 0.03 | 0.01 ± 0.03 | 0.16 ± 0.06 |
| 175 | T616Y | 616 | 0.54 ± 0.09 | 0.64 ± 0.09 | 0.05 ± 0.38 |
| 176 | A617G | 617 | 0.03 ± 0.03 | 0.05 ± 0.03 | 0.24 ± 0.06 |
| 177 | F619M | 619 | 0.12 ± 0.07 | 0.55 ± 0.07 | 0.22 ± 0.25 |
| 178 | Q620A | 620 | 0.22 ± 0.04 | 0 ± 0.05 | 0.18 ± 0.09 |
| 179 | Q620R | 620 | 0.25 ± 0.03 | 0.18 ± 0.03 | 0.17 ± 0.04 |
| 180 | Q620N | 620 | 0.26 ± 0.14 | 0.28 ± 0.14 | 0.36 ± 0.21 |
| 181 | Q620L | 620 | 0.14 ± 0.04 | 0.45 ± 0.04 | 0.4 ± 0.16 |
| 182 | Q620K | 620 | 0.1 ± 0.07 | 0.24 ± 0.07 | 0.04 ± 0.1 |
| 183 | T621A | 621 | 0.18 ± 0.04 | 0.13 ± 0.04 | 0.17 ± 0.1 |
| 184 | H622G | 622 | 0.05 ± 0.03 | 0.18 ± 0.03 | 0.07 ± 0.06 |
| 185 | H622S | 622 | 0.16 ± 0.06 | 0.59 ± 0.06 | 0.08 ± 0.1 |
| 186 | H622T | 622 | 0.01 ± 0.09 | 0.84 ± 0.08 | 0.31 ± 0.34 |
| 187 | H622V | 622 | 0.18 ± 0.05 | 0.15 ± 0.05 | 0.31 ± 0.12 |
| 188 | T623E | 623 | 0.32 ± 0.05 | 0.23 ± 0.05 | 0.02 ± 0.05 |
| 189 | T623H | 623 | 0.6 ± 0.1 | 0.01 ± 0.11 | 0.58 ± 0.55 |
| 190 | T623L | 623 | 0.33 ± 0.05 | 0.18 ± 0.05 | 0.17 ± 0.16 |
| 191 | T623M | 623 | 0.21 ± 0.07 | 0.28 ± 0.07 | 0.59 ± 0.22 |
| 192 | T623F | 623 | 0.8 ± 0.1 | 0.61 ± 0.1 | 0.47 ± 0.32 |
| 193 | T624P | 624 | 0.92 ± 0.02 | 0.92 ± 0.02 | 0.04 ± 0.03 |
| 194 | L627C | 627 | 0.14 ± 0.13 | 0.84 ± 0.11 | 0.57 ± 0.48 |
| 195 | L628C | 628 | 0.31 ± 0.09 | 0.1 ± 0.1 | 0.29 ± 0.31 |
| 196 | L628W | 628 | 0.25 ± 0.06 | 0.01 ± 0.07 | 0.67 ± 0.15 |
| 197 | N630R | 630 | 0.53 ± 0.05 | 0.06 ± 0.06 | 0.94 ± 0.08 |
| 198 | I633N | 633 | 0.16 ± 0.06 | 0.65 ± 0.06 | 0.15 ± 0.1 |
| 199 | I633M | 633 | 0.17 ± 0.07 | 0.28 ± 0.07 | 0.1 ± 0.19 |
| 200 | I633S | 633 | 0.02 ± 0.04 | 0.35 ± 0.04 | 0.22 ± 0.08 |
| 201 | E634N | 634 | 0.52 ± 0.12 | 0.46 ± 0.12 | 0 ± 0.36 |
| 202 | P635A | 635 | 0.04 ± 0.05 | 0.29 ± 0.05 | 0.59 ± 0.07 |
| 203 | P635D | 635 | 0.14 ± 0.09 | 0.49 ± 0.09 | 0.52 ± 0.14 |
| 204 | P635E | 635 | 0.51 ± 0.06 | 0.49 ± 0.06 | 0.7 ± 0.16 |
| 205 | P635T | 635 | 0.36 ± 0.06 | 0.06 ± 0.06 | 0.01 ± 0.08 |
| 206 | T639G | 639 | 0.52 ± 0.06 | 0.44 ± 0.06 | 0.06 ± 0.23 |
| 207 | D840S | 840 | 0.37 ± 0.08 | 0.33 ± 0.08 | 0.1 ± 0.16 |
| 208 | A842S | 842 | 0.36 ± 0.06 | 0.08 ± 0.06 | 0.04 ± 0.1 |
| 209 | A844E | 844 | 0.38 ± 0.1 | 0.06 ± 0. 1 | 0.13 ± 0.21 |
| 210 | T851A | 851 | 0.41 ± 0.06 | 0.14 ± 0.06 | 0.08 ± 0.1 |
| 211 | T851V | 851 | 0.32 ± 0.06 | 0.13 ± 0.06 | 0.54 ± 0.07 |
| 212 | E853V | 853 | 0.14 ± 0.07 | 0.1 ± 0.07 | 0.38 ± 0.09 |
| 213 | R862K | 862 | 0.04 ± 0.14 | 0.54 ± 0.13 | 0.02 ± 0.38 |
| 214 | S866F | 866 | 0 ± 0.13 | 0.06 ± 0.12 | 0.1 ± 0.14 |
| 215 | S866T | 866 | 0.05 ± 0.13 | 0.02 ± 0.13 | 0.4 ± 0.15 |
| 216 | V873A | 873 | 0.16 ± 0.11 | 0.05 ± 0.11 | 0.08 ± 0.16 |
| 217 | N878D | 878 | 0.03 ± 0.06 | 0.02 ± 0.06 | 0.04 ± 0.08 |
| 218 | Q880R | 880 | 0.13 ± 0.05 | 0.02 ± 0.05 | 0.01 ± 0.06 |
| 219 | Q880G | 880 | 0.25 ± 0.04 | 0.19 ± 0.04 | 0.64 ± 0.05 |
| 220 | A882D | 882 | 0.32 ± 0.05 | 0.22 ± 0.05 | 0.1 ± 0.07 |
| 221 | A882S | 882 | 0.11 ± 0.12 | 0.14 ± 0.11 | 0.23 ± 0.22 |
| 222 | N883G | 883 | 0.42 ± 0.08 | 0.37 ± 0.08 | 0.03 ± 0.11 |
| 223 | N883K | 883 | 0.12 ± 0.16 | 0.23 ± 0.16 | 0.16 ± 0.1 |
| 224 | S884V | 884 | 0.05 ± 0.11 | 0.61 ± 0.1 | 0.03 ± 0.14 |
| 225 | S886L | 886 | 0.09 ± 0.08 | 0.12 ± 0.08 | 0.05 ± 0.11 |
| 226 | S886M | 886 | 0.32 ± 0.11 | 0.15 ± 0.11 | 0.4 ± 0.35 |
| 227 | S886W | 886 | 0.23 ± 0.07 | 0.01 ± 0.07 | 0.7 ± 0.19 |
| 228 | Q890C | 890 | 0.03 ± 0.11 | 0.64 ± 0.1 | 0.08 ± 0.54 |
| 229 | Q890H | 890 | 0.39 ± 0.09 | 0.07 ± 0.09 | 0.04 ± 0.11 |
| 230 | Q890W | 890 | 0.03 ± 0.08 | 0.23 ± 0.07 | 0.03 ± 0.08 |
| 231 | A894R | 894 | 0.19 ± 0.06 | 0.06 ± 0.06 | 0.04 ± 0.08 |
| 232 | A894D | 894 | 0.04 ± 0.06 | 0.09 ± 0.06 | 0.21 ± 0.05 |
| 233 | Y895D | 895 | 0.16 ± 0.04 | 0 ± 0.04 | 0.09 ± 0.04 |
| 234 | H899A | 899 | 0.21 ± 0.08 | 0.16 ± 0.07 | 0.01 ± 0.48 |
| 235 | H899N | 899 | 0.15 ± 0.15 | 0.7 ± 0.14 | 0.08 ± 0.18 |
| 236 | E901D | 901 | 0.07 ± 0.1 | 0.05 ± 0.1 | 0.14 ± 0.15 |
| 237 | P903T | 903 | 0.64 ± 0.13 | 0.52 ± 0.12 | 0.39 ± 0.18 |
| 328 | G906A | 906 | 0.41 ± 0.05 | 0.56 ± 0.04 | 0.42 ± 0.05 |
| 239 | G906S | 906 | 0.4 ± 0.05 | 0.16 ± 0.05 | 0.15 ± 0.06 |
| 240 | 1907A | 907 | 0.7 ± 0.1 | 0.42 ± 0.1 | 0.27 ± 0.54 |
| 241 | 1907V | 907 | 0.15 ± 0.07 | 0.12 ± 0.07 | 0.13 ± 0.06 |
| 242 | R912A | 912 | 0.46 ± 0.09 | 0.49 ± 0.09 | 0.31 ± 0.64 |
| 243 | R912L | 912 | 0.53 ± 0.08 | 0.38 ± 0.08 | 0.21 ± 0.16 |
| 244 | R912S | 912 | 1.04 ± 0.11 | 0.3 ± 0.11 | 0.31 ± 0.54 |
| 245 | R912V | 912 | 0.19 ± 0.09 | 0.23 ± 0.09 | 0.03 ± 0.09 |

¹The phenotype scores (i.e. natural logarithm of relative enrichment) of each point mutation are provided. The error bar estimates the precision of the measurement, which is dependent on the sequencing count of each variant in the libraries. Only variants with counts greater than 50 in all libraries were included in the analysis.

[0107] Table 5 shows the sequences used as primers to generate the AsCas12a saturation mutagenesis library. Standard recombinant methods and techniques were used. The screening library was constructed using the method described in Wrenbeck et al. (2016).

TABLE 5
Primer sequences to generate AsCas12a saturation mutagenesis library.

| SEQ ID NO.: | Name | Sequence (5′-3′)^{a} |
|---|---|---|
| 246 | 499_NNK_HsCas12a_R499 | gaccccgagttctccgccNNKctgacaggcatcaaactg |
| 247 | 500_NNK_HsCas12a_L500 | ggaccccgagttctccgccagaNNKacaggcatcaaac |
| 248 | 501_NNK_HsCas12a_T501 | cgagttctccgccagactgNNKggcatcaaactggaaatgg |
| 249 | 502_NNK_HsCas12a_G502 | gagttctccgccagactgacaNNKatcaaactggaaatggaaccc |
| 250 | 503_NNK_HsCas12a_I503 | ctccgccagactgacaggcNNKaaactggaaatggaaccca |
| 251 | 504_NNK_HsCas12a_K504 | gccagactgacaggcatcNNKctggaaatggaacccagc |
| 252 | 505_NNK_HsCas12a_L505 | ccagactgacaggcatcaaaNNKgaaatggaacccagcctgtc |
| 253 | 506_NNK_HsCas12a_E506 | gactgacaggcatcaaactgNNKatggaacccagcctgtcctt |
| 254 | 507_NNK_HsCas12a_M507 | ctgacaggcatcaaactggaaNNKgaacccagcctgtccttctac |
| 255 | 508_NNK_HsCas12a_E508 | ctgacaggcatcaaactggaaatgNNKcccagcctgtccttc |
| 256 | 509_NNK_HsCas12a_P509 | gactgacaggcatcaaactggaaatggaaNNKagcctgtccttctac |
| 257 | 510_NNK_HsCas12a_S510 | atcaaactggaaatggaacccNNKctgtccttctacaacaaggcc |
| 258 | 511_NNK_HsCas12a_L511 | aaactggaaatggaacccagcNNKtccttctacaacaaggccaga |
| 259 | 512_NNK_HsCas12a_S512 | ctggaaatggaacccagcctgNNKttctacaacaaggccagaaac |
| 260 | 513_NNK_HsCas12a_F513 | gaaatggaacccagcctgtccNNKtacaacaaggccagaaactac |
| 261 | 514_NNK_HsCas12a_Y514 | ggaacccagcctgtccttcNNKaacaaggccagaaactacg |
| 262 | 515_NNK_HsCas12a_N515 | cccagcctgtccttctacNNKaaggccagaaactacgcc |
| 263 | 516_NNK_HsCas12a_K516 | cagcctgtccttctacaacNNKgccagaaactacgccacca |
| 264 | 517_NNK_HsCas12a_A517 | cagcctgtccttctacaacaagNNKagaaactacgccaccaagaaac |
| 265 | 518_NNK_HsCas12a_R518 | ctgtccttctacaacaaggccNNKaactacgccaccaagaaaccc |
| 266 | 519_NNK_HsCas12a_N519 | tccttctacaacaaggccagaNNKtacgccaccaagaaaccctac |
| 267 | 520_NNK_HsCas12a_Y520 | ttctacaacaaggccagaaacNNKgccaccaagaaaccctacagc |
| 268 | 521_NNK_HsCas12a_A521 | tacaacaaggccagaaactacNNKaccaagaaaccctacagcgtg |
| 269 | 522_NNK_HsCas12a_T522 | caaggccagaaactacgccNNKaagaaaccctacagcgtgg |
| 270 | 523_NNK_HsCas12a_K523 | ggccagaaactacgccaccNNKaaaccctacagcgtggaaa |
| 271 | 524_NNK_HsCas12a_K524 | ccagaaactacgccaccaagNNKccctacagcgtggaaaagtt |
| 272 | 525_NNK_HsCas12a_P525 | ggccagaaactacgccaccaagaaaNNKtacagcgtggaaaagtttaag |
| 273 | 526_NNK_HsCas12a_Y526 | aactacgccaccaagaaacccNNKagcgtggaaaagtttaagctg |
| 274 | 527_NNK_HsCas12a_S527 | ctacgccaccaagaaaccctacNNKgtggaaaagtttaagctgaactt |
| 275 | 528_NNK_HsCas12a_V528 | cgccaccaagaaaccctacagcNNKgaaaagtttaagctgaacttcc |
| 276 | 529_NNK_HsCas12a_E529 | caccaagaaaccctacagcgtgNNKaagtttaagctgaacttccaga |
| 277 | 530_NNK_HsCas12a_K530 | caagaaaccctacagcgtggaaNNKtttaagctgaacttccagatgc |
| 278 | 531_NNK_HsCas12a_F531 | aaaccctacagcgtggaaaagNNKaagctgaacttccagatgccc |
| 279 | 532_NNK_HsCas12a_K532 | ccctacagcgtggaaaagtttNNKctgaacttccagatgcccac |
| 280 | 533_NNK_HsCas12a_L533 | tacagcgtggaaaagtttaagNNKaacttccagatgcccaccctg |
| 281 | 534_NNK_HsCas12a_N534 | gcgtggaaaagtttaagctgNNKttccagatgcccaccctggc |
| 282 | 535_NNK_HsCas12a_F535 | cgtggaaaagtttaagctgaacNNKcagatgcccaccctggccag |
| 283 | 536_NNK_HsCas12a_Q536 | ggaaaagtttaagctgaacttcNNKatgcccaccctggccagcg |
| 284 | 537_NNK_HsCas12a_M537 | ttaagctgaacttccagNNKcccaccctggccagcgg |
| 285 | 538_NNK_HsCas12a_P538 | aagctgaacttccagatgNNKaccctggccagcggct |
| 286 | 539_NNK_HsCas12a_T539 | gaacttccagatgcccNNKctggccagcggctggg |
| 287 | 540_NNK_HsCas12a_L540 | ttccagatgcccaccNNKgccagcggctgggac |
| 288 | 541_NNK_HsCas12a_A541 | cagatgcccaccctgNNKagcggctgggacgtg |
| 289 | 542_NNK_HsCas12a_S542 | atgcccaccctggccNNKggctgggacgtgaacaa |
| 290 | 543_NNK_HsCas12a_G543 | gcccaccctggccagcNNKtgggacgtgaacaaag |
| 291 | 544_NNK_HsCas12a_W544 | ccaccctggccagcggcNNKgacgtgaacaaagagaag |
| 292 | 545_NNK_HsCas12a_D545 | ccctggccagcggctggNNKgtgaacaaagagaagaac |
| 293 | 546_NNK_HsCas12a_V546 | ctggccagcggctgggacNNKaacaaagagaagaacaacg |
| 294 | 547_NNK_HsCas12a_N547 | ccagcggctgggacgtgNNKaaagagaagaacaacggc |
| 295 | 548_NNK_HsCas12a_K548 | gcggctgggacgtgaacNNKgagaagaacaacggcgc |
| 296 | 549_NNK_HsCas12a_E549 | cggctgggacgtgaacaaaNNKaagaacaacggcgccatc |
| 297 | 550_NNK_HsCas12a_K550 | ctgggacgtgaacaaagagNNKaacaacggcgccatcctgt |
| 298 | 551_NNK_HsCas12a_N551 | gggacgtgaacaaagagaagNNKaacggcgccatcctgttcg |
| 299 | 552_NNK_HsCas12a_N552 | gacgtgaacaaagagaagaacNNKggcgccatcctgttcgtgaa |
| 300 | 553_NNK_HsCas12a_G553 | cgtgaacaaagagaagaacaacNNKgccatcctgttcgtgaagaacg |
| 301 | 554_NNK_HsCas12a_A554 | gaacaaagagaagaacaacggcNNKatcctgttcgtgaagaacggac |
| 302 | 555_NNK_HsCas12a_I555 | agagaagaacaacggcgccNNKctgttcgtgaagaacggac |
| 303 | 556_NNK_HsCas12a_L556 | gagaagaacaacggcgccatcNNKttcgtgaagaacggactgtac |
| 304 | 557_NNK_HsCas12a_F557 | gaacaacggcgccatcctgNNKgtgaagaacggactgtact |
| 305 | 558_NNK_HsCas12a_V558 | caacggcgccatcctgttcNNKaagaacggactgtactacc |
| 306 | 559_NNK_HsCas12a_K559 | ggcgccatcctgttcgtgNNKaacggactgtactacctg |
| 307 | 560_NNK_HsCas12a_N560 | gccatcctgttcgtgaagNNKggactgtactacctgggc |
| 308 | 561_NNK_HsCas12a_G561 | gccatcctgttcgtgaagaacNNKctgtactacctgggcatcatg |
| 309 | 562_NNK_HsCas12a_L562 | tcctgttcgtgaagaacggaNNKtactacctgggcatcatgcc |
| 310 | 563_NNK_HsCas12a_Y563 | ctgttcgtgaagaacggactgNNKtacctgggcatcatgcctaag |
| 311 | 564_NNK_HsCas12a_Y564 | cgtgaagaacggactgtacNNKctgggcatcatgcctaagc |
| 312 | 565_NNK_HsCas12a_L565 | gtgaagaacggactgtactacNNKggcatcatgcctaagcagaag |
| 313 | 566_NNK_HsCas12a_G566 | aagaacggactgtactacctgNNKatcatgcctaagcagaagggc |
| 314 | 567_NNK_HsCas12a_I567 | ggactgtactacctgggcNNKatgcctaagcagaagggc |
| 315 | 568_NNK_HsCas12a_M568 | gactgtactacctgggcatcNNKcctaagcagaagggcagata |
| 316 | 569_NNK_HsCas12a_P569 | ctgtactacctgggcatcatgNNKaagcagaagggcagatacaag |
| 317 | 570_NNK_HsCas12a_K570 | ctacctgggcatcatgcctNNKcagaagggcagatacaagg |
| 318 | 571_NNK_HsCas12a_Q571 | cctgggcatcatgcctaagNNKaagggcagatacaaggccc |
| 319 | 572_NNK_HsCas12a_K572 | ggcatcatgcctaagcagNNKggcagatacaaggccctg |
| 320 | 573_NNK_HsCas12a_G573 | ggcatcatgcctaagcagaagNNKagatacaaggccctgtccttt |
| 321 | 574_NNK_HsCas12a_R574 | catgcctaagcagaagggcNNKtacaaggccctgtcctttg |
| 322 | 575_NNK_HsCas12a_Y575 | gcctaagcagaagggcagaNNKaaggccctgtcctttgagc |
| 323 | 576_NNK_HsCas12a_K576 | aagcagaagggcagatacNNKgccctgtcctttgagccc |
| 324 | 577_NNK_HsCas12a_A577 | gcagaagggcagatacaagNNKctgtcctttgagcccaccg |
| 325 | 578_NNK_HsCas12a_L578 | gaagggcagatacaaggccNNKtcctttgagcccaccgaaa |
| 326 | 579_NNK_HsCas12a_S579 | gggcagatacaaggccctgNNKtttgagcccaccgaaaaga |
| 327 | 580_NNK_HsCas12a_F580 | agatacaaggccctgtccNNKgagcccaccgaaaagacc |
| 328 | 581_NNK_HsCas12a_E581 | ggcagatacaaggccctgtcctttNNKcccaccgaaaagac |
| 329 | 582_NNK_HsCas12a_P582 | caaggccctgtcctttgagNNKaccgaaaagaccagcgag |
| 330 | 584_NNK_HsCas12a_E584 | ctgtcctttgagcccaccNNKaagaccagcgagggcttt |
| 331 | 584_NNK_HsCas12a_T584 | ccctgtcctttgagcccNNKgaaaagaccagcgaggg |
| 332 | 585_NNK_HsCas12a_K585 | gtcctttgagcccaccgaaNNKaccagcgagggctttg |
| 333 | 586_NNK_HsCas12a_T586 | tgtcctttgagcccaccgaaaagNNKagcgagggctttgac |
| 334 | 587_NNK_HsCas12a_S587 | tttgagcccaccgaaaagaccNNKgagggctttgacaagatgtac |
| 335 | 588_NNK_HsCas12a_E588 | gagcccaccgaaaagaccagcNNKggctttgacaagatgtactac |
| 336 | 589_NNK_HsCas12a_G589 | cccaccgaaaagaccagcgagNNKtttgacaagatgtactacgat |
| 337 | 590_NNK_HsCas12a_F590 | accgaaaagaccagcgagggcNNKgacaagatgtactacgattact |
| 338 | 591_NNK_HsCas12a_D591 | ccgaaaagaccagcgagggctttNNKaagatgtactacgattacttcc |
| 339 | 592_NNK_HsCas12a_K592 | aagaccagcgagggctttgacNNKatgtactacgattacttcccc |
| 340 | 593_NNK_HsCas12a_M593 | ccagcgagggctttgacaagNNKtactacgattacttccccga |
| 341 | 594_NNK_HsCas12a_Y594 | gcgagggctttgacaagatgNNKtacgattacttccccgacgc |
| 342 | 595_NNK_HsCas12a_Y595 | gggctttgacaagatgtacNNKgattacttccccgacgccg |
| 343 | 596_NNK_HsCas12a_D596 | ggctttgacaagatgtactacNNKtacttccccgacgccgccaa |
| 344 | 597_NNK_HsCas12a_Y597 | agggctttgacaagatgtactacgatNNKttccccgacgccgc |
| 345 | 598_NNK_HsCas12a_F598 | gctttgacaagatgtactacgattacNNKcccgacgccgccaaga |
| 346 | 599_NNK_HsCas12a_P599 | tttgacaagatgtactacgattacttcNNKgacgccgccaagatgatc |
| 347 | 600_NNK_HsCas12a_D600 | gtactacgattacttccccNNKgccgccaagatgatcccca |
| 348 | 601_NNK_HsCas12a_A601 | actacgattacttccccgacNNKgccaagatgatccccaagtg |
| 349 | 602_NNK_HsCas12a_A602 | cgattacttccccgacgccNNKaagatgatccccaagtgca |
| 350 | 603_NNK_HsCas12a_K603 | cttccccgacgccgccNNKatgatccccaagtgca |
| 351 | 604_NNK_HsCas12a_M604 | cccgacgccgccaagNNKatccccaagtgcagc |
| 352 | 605_NNK_HsCas12a_I605 | cgacgccgccaagatgNNKcccaagtgcagcaccc |
| 353 | 606_NNK_HsCas12a_P606 | gacgccgccaagatgatcNNKaagtgcagcacccagctg |
| 354 | 607_NNK_HsCas12a_K607 | ccgccaagatgatccccNNKtgcagcacccagctgaa |
| 355 | 608_NNK_HsCas12a_C608 | gccaagatgatccccaagNNKagcacccagctgaaggcc |
| 356 | 609_NNK_HsCas12a_S609 | aagatgatccccaagtgcNNKacccagctgaaggccgtg |
| 357 | 610_NNK_HsCas12a_T610 | tgatccccaagtgcagcNNKcagctgaaggccgtgac |
| 358 | 611_NNK_HsCas12a_Q611 | ccccaagtgcagcaccNNKctgaaggccgtgaccg |
| 359 | 613_NNK_HsCas12a_K613 | tgcagcacccagctgNNKgccgtgaccgcccac |
| 360 | 613_NNK_HsCas12a_L613 | caagtgcagcacccagNNKaaggccgtgaccgccc |
| 361 | 614_NNK_HsCas12a_A614 | gcagcacccagctgaagNNKgtgaccgcccactttca |
| 362 | 615_NNK_HsCas12a_V615 | gcacccagctgaaggccNNKaccgcccactttcagac |
| 363 | 616_NNK_HsCas12a_T616 | ccagctgaaggccgtgNNKgcccactttcagaccc |
| 364 | 617_NNK_HsCas12a_A617 | cagctgaaggccgtgaccNNKcactttcagacccacacc |
| 365 | 618_NNK_HsCas12a_H618 | tgaaggccgtgaccgccNNKtttcagacccacaccac |
| 366 | 619_NNK_HsCas12a_F619 | gccgtgaccgcccacNNKcagacccacaccacc |
| 367 | 620_NNK_HsCas12a_Q620 | aaggccgtgaccgcccactttNNKacccacaccacc |
| 368 | 621_NNK_HsCas12a_T621 | gaccgcccactttcagNNKcacaccacccccatcc |
| 369 | 622_NNK_HsCas12a_H622 | cgcccactttcagaccNNKaccacccccatcctgc |
| 370 | 623_NNK_HsCas12a_T623 | cccactttcagacccacNNKacccccatcctgctgag |
| 371 | 624_NNK_HsCas12a_T624 | cactttcagacccacaccNNKcccatcctgctgagcaac |
| 372 | 625_NNK_HsCas12a_P625 | cactttcagacccacaccaccNNKatcctgctgagcaacaacttc |
| 373 | 626_NNK_HsCas12a_I626 | cagacccacaccacccccNNKctgctgagcaacaacttc |
| 374 | 627_NNK_HsCas12a_L627 | gacccacaccacccccatcNNKctgagcaacaacttcatcg |
| 375 | 628_NNK_HsCas12a_L628 | ccacaccacccccatcctgNNKagcaacaacttcatcgagc |
| 376 | 629_NNK_HsCas12a_S629 | accacccccatcctgctgNNKaacaacttcatcgagccc |
| 377 | 630_NNK_HsCas12a_N630 | cccccatcctgctgagcNNKaacttcatcgagcccct |
| 378 | 631_NNK_HsCas12a_N631 | cccatcctgctgagcaacNNKttcatcgagcccctggaa |
| 379 | 632_NNK_HsCas12a_F632 | ccatcctgctgagcaacaacNNKatcgagcccctggaaatcac |
| 380 | 633_NNK_HsCas12a_I633 | cctgctgagcaacaacttcNNKgagcccctggaaatcacca |
| 381 | 634_NNK_HsCas12a_E634 | cctgctgagcaacaacttcatcNNKcccctggaaatcaccaaagag |
| 382 | 635_NNK_HsCas12a_P635 | gctgagcaacaacttcatcgagNNKctggaaatcaccaaagagatct |
| 383 | 636_NNK_HsCas12a_L636 | gagcaacaacttcatcgagcccNNKgaaatcaccaaagagatctacg |
| 384 | 637_NNK_HsCas12a_E637 | aacaacttcatcgagcccctgNNKatcaccaaagagatctacgac |
| 385 | 638_NNK_HsCas12a_I638 | aacaacttcatcgagcccctggaaNNKaccaaagagatctacgacc |
| 386 | 639_NNK_HsCas12a_T639 | ttcatcgagcccctggaaatcNNKaaagagatctacgacctgaac |
| 387 | 640_NNK_HsCas12a_K640 | cgagcccctggaaatcaccNNKgagatctacgacctgaaca |
| 388 | 840_NNK_HsCas12a_D840 | ctgagccacgacctgtccNNKgaagctagagcactgctg |
| 389 | 841_NNK_HsCas12a_E841 | ccacgacctgtccgacNNKgctagagcactgctgc |
| 390 | 842_NNK_HsCas12a_A842 | ccacgacctgtccgacgaaNNKagagcactgctgccc |
| 391 | 843_NNK_HsCas12a_R843 | gacctgtccgacgaagctNNKgcactgctgcccaacg |
| 392 | 844_NNK_HsCas12a_A844 | ctgtccgacgaagctagaNNKctgctgcccaacgtgatc |
| 393 | 845_NNK_HsCas12a_L845 | gtccgacgaagctagagcaNNKctgcccaacgtgatcacaa |
| 394 | 846_NNK_HsCas12a_L846 | ccgacgaagctagagcactgNNKcccaacgtgatcacaaaaga |
| 395 | 847_NNK_HsCas12a_P847 | gacgaagctagagcactgctgNNKaacgtgatcacaaaagaggtg |
| 396 | 848_NNK_HsCas12a_N848 | aagctagagcactgctgcccNNKgtgatcacaaaagaggtgtc |
| 397 | 849_NNK_HsCas12a_V849 | ctagagcactgctgcccaacNNKatcacaaaagaggtgtccca |
| 398 | 850_NNK_HsCas12a_I850 | gcactgctgcccaacgtgNNKacaaaagaggtgtcccac |
| 399 | 851_NNK_HsCas12a_T851 | ctgctgcccaacgtgatcNNKaaagaggtgtcccacgag |
| 400 | 852_NNK_HsCas12a_K852 | ctgcccaacgtgatcacaNNKgaggtgtcccacgagatc |
| 401 | 853_NNK_HsCas12a_E853 | cactgctgcccaacgtgatcacaaaaNNKgtgtcccacgagat |
| 402 | 854_NNK_HsCas12a_V854 | gcccaacgtgatcacaaaagagNNKtcccacgagatcatcaaggac |
| 403 | 855_NNK_HsCas12a_S855 | aacgtgatcacaaaagaggtgNNKcacgagatcatcaaggaccgg |
| 404 | 856_NNK_HsCas12a_H856 | tgatcacaaaagaggtgtccNNKgagatcatcaaggaccggcg |
| 405 | 857_NNK_HsCas12a_E857 | cacaaaagaggtgtcccacNNKatcatcaaggaccggcggt |
| 406 | 858_NNK_HsCas12a_I858 | caaaagaggtgtcccacgagNNKatcaaggaccggcggtttac |
| 407 | 859_NNK_HsCas12a_I859 | gaggtgtcccacgagatcNNKaaggaccggcggtttacc |
| 408 | 860_NNK_HsCas12a_K860 | gtgtcccacgagatcatcNNKgaccggcggtttacctc |
| 409 | 861_NNK_HsCas12a_D861 | gtgtcccacgagatcatcaagNNKcggcggtttacctcc |
| 410 | 862_NNK_HsCas12a_R862 | tcccacgagatcatcaaggacNNKcggtttacctccgataagttc |
| 411 | 863_NNK_HsCas12a_R863 | cacgagatcatcaaggaccggNNKtttacctccgataagttcttc |
| 412 | 864_NNK_HsCas12a_F864 | gagatcatcaaggaccggcggNNKacctccgataagttcttcttc |
| 413 | 865_NNK_HsCas12a_T865 | cgagatcatcaaggaccggcggtttNNKtccgataagttcttcttc |
| 414 | 866_NNK_HsCas12a_S866 | atcaaggaccggcggtttaccNNKgataagttcttcttccacgtg |
| 415 | 867_NNK_HsCas12a_D867 | ggaccggcggtttacctccNNKaagttcttcttccacgtgc |
| 416 | 868_NNK_HsCas12a_K868 | ccggcggtttacctccgatNNKttcttcttccacgtgccc |
| 417 | 869_NNK_HsCas12a_F869 | ggcggtttacctccgataagNNKttcttccacgtgcccatcac |
| 418 | 870_NNK_HsCas12a_F870 | ggtttacctccgataagttcNNKttccacgtgcccatcaccct |
| 419 | 871_NNK_HsCas12a_F871 | tttacctccgataagttcttcNNKcacgtgcccatcaccctgaac |
| 420 | 872_NNK_HsCas12a_H872 | acctccgataagttcttcttcNNKgtgcccatcaccctgaactac |
| 421 | 873_NNK_HsCas12a_V873 | tccgataagttcttcttccacNNKcccatcaccctgaactaccag |
| 422 | 874_NNK_HsCas12a_P874 | gataagttcttcttccacgtgNNKatcaccctgaactaccaggcc |
| 423 | 875_NNK_HsCas12a_I875 | ttcttcttccacgtgcccNNKaccctgaactaccaggcc |
| 424 | 876_NNK_HsCas12a_T876 | tcttccacgtgcccatcNNKctgaactaccaggccgc |
| 425 | 877_NNK_HsCas12a_L877 | ccacgtgcccatcaccNNKaactaccaggccgcca |
| 426 | 878_NNK_HsCas12a_N878 | cgtgcccatcaccctgNNKtaccaggccgccaaca |
| 427 | 879_NNK_HsCas12a_Y879 | gcccatcaccctgaacNNKcaggccgccaacagcc |
| 428 | 880_NNK_HsCas12a_Q880 | ccatcaccctgaactacNNKgccgccaacagcccca |
| 429 | 881_NNK_HsCas12a_A881 | atcaccctgaactaccagNNKgccaacagccccagcaag |
| 430 | 882_NNK_HsCas12a_A882 | accctgaactaccaggccNNKaacagccccagcaagttc |
| 431 | 883_NNK_HsCas12a_N883 | ctgaactaccaggccgccNNKagccccagcaagttcaac |
| 432 | 884_NNK_HsCas12a_S884 | aactaccaggccgccaacNNKcccagcaagttcaaccag |
| 433 | 885_NNK_HsCas12a_P885 | ctaccaggccgccaacagcNNKagcaagttcaaccagagag |
| 434 | 886_NNK_HsCas12a_S886 | caggccgccaacagccccNNKaagttcaaccagagagtg |
| 435 | 887_NNK_HsCas12a_K887 | gccgccaacagccccagcNNKttcaaccagagagtgaac |
| 436 | 888_NNK_HsCas12a_F888 | gccaacagccccagcaagNNKaaccagagagtgaacgcc |
| 437 | 889_NNK_HsCas12a_N889 | caacagccccagcaagttcNNKcagagagtgaacgcctacc |
| 438 | 890_NNK_HsCas12a_Q890 | cagccccagcaagttcaacNNKagagtgaacgcctacctga |
| 439 | 891_NNK_HsCas12a_R891 | ccccagcaagttcaaccagNNKgtgaacgcctacctgaaag |
| 440 | 892_NNK_HsCas12a_V892 | cccagcaagttcaaccagagaNNKaacgcctacctgaaagagcac |
| 441 | 893_NNK_HsCas12a_N893 | gcaagttcaaccagagagtgNNKgcctacctgaaagagcaccc |
| 442 | 894_NNK_HsCas12a_A894 | aagttcaaccagagagtgaacNNKtacctgaaagagcaccccgag |
| 443 | 895_NNK_HsCas12a_Y895 | aaccagagagtgaacgccNNKctgaaagagcaccccgag |
| 444 | 896_NNK_HsCas12a_L896 | ccagagagtgaacgcctacNNKaaagagcaccccgagacac |
| 445 | 897_NNK_HsCas12a_K897 | gagtgaacgcctacctgNNKgagcaccccgagacacc |
| 446 | 898_NNK_HsCas12a_E898 | agagagtgaacgcctacctgaaaNNKcaccccgagacacc |
| 447 | 899_NNK_HsCas12a_H899 | gaacgcctacctgaaagagNNKcccgagacacccatcattg |
| 448 | 900_NNK_HsCas12a_P900 | cgcctacctgaaagagcacNNKgagacacccatcattggca |
| 449 | 901_NNK_HsCas12a_E901 | ctacctgaaagagcaccccNNKacacccatcattggcatcg |
| 450 | 902_NNK_HsCas12a_T902 | ctgaaagagcaccccgagNNKcccatcattggcatcgac |
| 451 | 903_NNK_HsCas12a_P903 | tgaaagagcaccccgagacaNNKatcattggcatcgacagagg |
| 452 | 904_NNK_HsCas12a_I904 | agcaccccgagacacccNNKattggcatcgacagagg |
| 453 | 905_NNK_HsCas12a_I905 | ccccgagacacccatcNNKggcatcgacagaggcg |
| 454 | 906_NNK_HsCas12a_G906 | gagcaccccgagacacccatcattNNKatcgacagaggcg |
| 455 | 907_NNK_HsCas12a_I907 | gagacacccatcattggcNNKgacagaggcgagcggaac |
| 456 | 908_NNK_HsCas12a_D908 | acacccatcattggcatcNNKagaggcgagcggaacctg |
| 457 | 909_NNK_HsCas12a_R909 | cccatcattggcatcgacNNKggcgagcggaacctgatc |
| 458 | 910_NNK_HsCas12a_G910 | cccatcattggcatcgacagaNNKgagcggaacctgatctacatc |
| 459 | 911_NNK_HsCas12a_E911 | tcattggcatcgacagaggcNNKcggaacctgatctacatcac |
| 460 | 912_NNK_HsCas12a_R912 | tggcatcgacagaggcgagNNKaacctgatctacatcaccg |
| 461 | 913_NNK_HsCas12a_N913 | atcgacagaggcgagcggNNKctgatctacatcaccgtg |

^{a}For “NNK”, N refers to A, C, T or G; K refers to G or T.

[0108] With respect to Table 4, the reference (i.e., wild-type) polypeptide sequence is SEQ ID NO.: 462 upon which these mutants are based by comparison. Polynucleotides codon-optimized for expression in E. coli and human cells that encode SEQ ID NO.:462 are SEQ ID NOs.: 463 and 464, respectively. The same mutations were introduced as well into M537R/F870L-AsCas12a background. The corresponding reference polypeptide sequence for the M537R/F870L-Cas12a is SEQ ID NO.: 465 (the altered amino acids are underlined). Polynucleotides codon-optimized for expression in E. coli and human cells that encode SEQ ID NO.:465 are SEQ ID NOs.: 466 and 467, respectively (the altered codons are underlined).

SEQ ID NO.: 462

MTQFEGFTNLYQVSKTLRFELIPQGKTLKHIQEQGFIEEDKARNDHYKEL
KPIIDRIYKTYADQCLQLVQLDWENLSAAIDSYRKEKTEETRNALIEEQA
TYRNAIHDYFIGRTDNLTDAINKRHAEIYKGLFKAELFNGKVLKQLGTVT
TTEHENALLRSFDKFTTYFSGFYENRKNVFSAEDISTAIPHRIVQDNFPK
FKENCHIFTRLITAVPSLREHFENVKKAIGIFVSTSIEEVFSFPFYNQLL
TQTQIDLYNQLLGGISREAGTEKIKGLNEVLNLAIQKNDETAHIIASLPH
RFIPLFKQILSDRNTLSFILEEFKSDEEVIQSFCKYKTLLRNENVLETAE
ALFNELNSIDLTHIFISHKKLETISSALCDHWDTLRNALYERRISELTGK
ITKSAKEKVQRSLKHEDINLQEIISAAGKELSEAFKQKTSEILSHAHAAL
DQPLPTTLKKQEEKEILKSQLDSLLGLYHLLDWFAVDESNEVDPEFSARL
TGIKLEMEPSLSFYNKARNYATKKPYSVEKFKLNFQMPTLASGWDVNKEK
NNGAILFVKNGLYYLGIMPKQKGRYKALSFEPTEKTSEGFDKMYYDYFPD
AAKMIPKCSTQLKAVTAHFQTHTTPILLSNNFIEPLEITKEIYDLNNPEK
EPKKFQTAYAKKTGDQKGYREALCKWIDFTRDFLSKYTKTTSIDLSSLRP
SSQYKDLGEYYAELNPLLYHISFQRIAEKEIMDAVETGKLYLFQIYNKDF
AKGHHGKPNLHTLYWTGLFSPENLAKTSIKLNGQAELFYRPKSRMKRMAH
RLGEKMLNKKLKDQKTPIPDTLYQELYDYVNHRLSHDLSDEARALLPNVI
TKEVSHEIIKDRRFTSDKFFFHVPITLNYQAANSPSKFNQRVNAYLKEHP
ETPIIGIDRGERNLIYITVIDSTGKILEQRSLNTIQQFDYQKKLDNREKE
RVAARQAWSVVGTIKDLKQGYLSQVIHEIVDLMIHYQAVVVLENLNFGFK
SKRTGIAEKAVYQQFEKMLIDKLNCLVLKDYPAEKVGGVLNPYQLTDQFT
SFAKMGTQSGFLFYVPAPYTSKIDPLTGFVDPFVWKTIKNHESRKHFLEG
FDFLHYDVKTGDFILHFKMNRNLSFQRGLPGFMPAWDIVFEKNETQFDAK
GTPFIAGKRIVPVIENHRFTGRYRDLYPANELIALLEEKGIVFRDGSNIL
PKLLENDDSHAIDTMVALIRSVLQMRNSNAATGEDYINSPVRDLNGVCFD
SRFQNPEWPMDADANGAYHIALKGQLLLNHLKESKDLKLQNGISNQDWLA
YIQELRN

SEQ ID NO.: 463

atgACCCAGTTTGAAGGTTTCACCAATCTGTATCAGGTTAGCAAAACCCT
GCGTTTTGAACTGATTCCGCAGGGTAAAACCCTGAAACATATTCAAGAAC
AGGGCTTCATCGAAGAGGATAAAGCACGTAACGATCACTACAAAGAACTG
AAACCGATTATCGACCGCATCTATAAAACCTATGCAGATCAGTGTCTGCA
GCTGGTTCAGCTGGATTGGGAAAATCTGAGCGCAGCAATTGATAGTTATC
GCAAAGAAAAAACCGAAGAAACCCGTAATGCACTGATTGAAGAACAGGCA
ACCTATCGTAATGCCATCCATGATTATTTCATTGGTCGTACCGATAATCT
GACCGATGCAATTAACAAACGTCACGCCGAAATCTATAAAGGCCTGTTTA
AAGCCGAACTGTTTAATGGCAAAGTTCTGAAACAGCTGGGCACCGTTACC
ACCACCGAACATGAAAATGCACTGCTGCGTAGCTTTGATAAATTCACCAC
CTATTTCAGCGGCTTTTATGAGAATCGCAAAAACGTGTTTAGCGCAGAAG
ATATTAGCACCGCAATTCCGCATCGTATTGTGCAGGATAATTTCCCGAAA
TTCAAAGAGAACTGCCACATTTTTACCCGTCTGATTACCGCAGTTCCGAG
CCTGCGTGAACATTTTGAAAACGTTAAAAAAGCCATCGGCATCTTTGTTA
GCACCAGCATTGAAGAAGTTTTTAGCTTCCCGTTTTACAATCAGCTGCTG
ACCCAGACCCAGATTGATCTGTATAACCAACTGCTGGGTGGTATTAGCCG
TGAAGCAGGCACCGAAAAAATCAAAGGTCTGAATGAAGTGCTGAATCTGG
CCATTCAGAAAAATGATGAAACCGCACATATTATTGCAAGCCTGCCGCAT
CGTTTTATTCCGCTGTTCAAACAAATTCTGAGCGATCGTAATACCCTGAG
CTTTATTCTGGAAGAATTCAAATCCGATGAAGAGGTGATTCAGAGCTTTT
GCAAATACAAAACGCTGCTGCGCAATGAAAATGTTCTGGAAACTGCCGAA
GCACTGTTTAACGAACTGAATAGCATTGATCTGACCCACATCTTTATCAG
CCACAAAAAACTGGAAACCATTTCAAGCGCACTGTGTGATCATTGGGATA
CCCTGCGTAATGCCCTGTATGAACGTCGTATTAGCGAACTGACCGGTAAA
ATTACCAAAAGCGCGAAAGAAAAAGTTCAGCGCAGTCTGAAACATGAGGA
TATTAATCTGCAAGAGATTATTAGCGCAGCCGGTAAAGAACTGTCAGAAG
CATTTAAACAGAAAACCAGCGAAATTCTGTCACATGCACATGCAGCACTG
GATCAGCCGCTGCCGACCACCCTGAAAAAACAAGAAGAAAAAGAAATCCT
GAAAAGCCAGCTGGATAGCCTGCTGGGTCTGTATCATCTGCTGGACTGGT
TTGCAGTTGATGAAAGCAATGAAGTTGATCCGGAATTTAGCGCACGTCTG
ACCGGCATTAAACTGGAAATGGAACCGAGCCTGAGCTTTTATAACAAAGC
CCGTAATTATGCCACCAAAAAACCGTATAGCGTCGAAAAATTCAAACTGA
ACTTTCAGATGCCGACCCTGGCAAGCGGTTGGGATGTTAATAAAGAAAAA
AACAACGGTGCCATCCTGTTCGTGAAAAATGGCCTGTATTATCTGGGTAT
TATGCCGAAACAGAAAGGTCGTTATAAAGCGCTGAGCTTTGAACCGACGG
AAAAAACCAGTGAAGGTTTTGATAAAATGTACTACGACTATTTTCCGGAT
GCAGCCAAAATGATTCCGAAATGTAGCACCCAGCTGAAAGCAGTTACCGC
ACATTTTCAGACCCATACCACCCCGATTCTGCTGAGCAATAACTTTATTG
AACCGCTGGAAATCACCAAAGAGATCTACGATCTGAATAACCCGGAAAAA
GAGCCGAAAAAATTCCAGACCGCATATGCAAAAAAAACCGGTGATCAGAA
AGGTTATCGTGAAGCGCTGTGTAAATGGATTGATTTCACCCGTGATTTTC
TGAGCAAATACACCAAAACCACCAGTATCGATCTGAGCAGCCTGCGTCCG
AGCAGCCAGTATAAAGATCTGGGCGAATATTATGCAGAACTGAATCCGCT
GCTGTATCATATTAGCTTTCAGCGTATTGCCGAGAAAGAAATCATGGACG
CAGTTGAAACCGGTAAACTGTACCTGTTCCAGATCTACAATAAAGATTTT
GCCAAAGGCCATCATGGCAAACCGAATCTGCATACCCTGTATTGGACCGG
TCTGTTTAGCCCTGAAAATCTGGCAAAAACCTCGATTAAACTGAATGGTC
AGGCGGAACTGTTTTATCGTCCGAAAAGCCGTATGAAACGTATGGCACAT
CGTCTGGGTGAAAAAATGCTGAACAAAAAACTGAAAGACCAGAAAACCCC
GATCCCGGATACACTGTATCAAGAACTGTATGATTATGTGAACCATCGTC
TGAGCCATGATCTGAGTGATGAAGCACGTGCCCTGCTGCCGAATGTTATT
ACCAAAGAAGTTAGCCACGAGATCATTAAAGATCGTCGTTTTACCAGCGA
CAAATTCTTTTTTCATGTGCCGATTACCCTGAATTATCAGGCAGCAAATA
GCCCGAGCAAATTTAACCAGCGTGTTAATGCATATCTGAAAGAACATCCA
GAAACGCCGATTATTGGTATTGATCGTGGTGAACGTAACCTGATTTATAT
CACCGTTATTGATAGCACCGGCAAAATCCTGGAACAGCGTAGCCTGAATA
CCATTCAGCAGTTTGATTACCAGAAAAAACTGGATAATCGCGAGAAAGAA
CGTGTTGCAGCACGTCAGGCATGGTCAGTTGTTGGTACAATTAAAGACCT
GAAACAGGGTTATCTGAGCCAGGTTATTCATGAAATTGTGGATCTGATGA
TTCACTATCAGGCCGTTGTTGTGCTGGAAAACCTGAATTTTGGCTTTAAA
AGCAAACGTACCGGCATTGCAGAAAAAGCAGTTTATCAGCAGTTCGAGAA
AATGCTGATTGACAAACTGAATTGCCTGGTGCTGAAAGATTATCCGGCTG
AAAAAGTTGGTGGTGTTCTGAATCCGTATCAGCTGACCGATCAGTTTACC
AGCTTTGCAAAAATGGGCACCCAGAGCGGATTTCTGTTTTATGTTCCGGC
ACCGTATACGAGCAAAATTGATCCGCTGACCGGTTTTGTTGATCCGTTTG
TTTGGAAAACCATCAAAAACCATGAAAGCCGCAAACATTTTCTGGAAGGT
TTCGATTTTCTGCATTACGACGTTAAAACGGGTGATTTCATCCTGCACTT
TAAAATGAATCGCAATCTGAGTTTTCAGCGTGGCCTGCCTGGTTTTATGC
CTGCATGGGATATTGTGTTTGAGAAAAACGAAACACAGTTCGATGCAAAA
GGCACCCCGTTTATTGCAGGTAAACGTATTGTTCCGGTGATTGAAAATCA
TCGTTTCACCGGTCGTTATCGCGATCTGTATCCGGCAAATGAACTGATCG
CACTGCTGGAAGAGAAAGGTATTGTTTTTCGTGATGGCTCAAACATTCTG
CCGAAACTGCTGGAAAATGATGATAGCCATGCAATTGATACCATGGTTGC
ACTGATTCGTAGCGTTCTGCAGATGCGTAATAGCAATGCAGCAACCGGTG
AAGATTACATTAATAGTCCGGTTCGTGATCTGAATGGTGTTTGTTTTGAT
AGCCGTTTTCAGAATCCGGAATGGCCGATGGATGCAGATGCAAATGGTGC
ATATCATATTGCACTGAAAGGACAGCTGCTGCTGAACCACCTGAAAGAAA
GCAAAGATCTGAAACTGCAAAACGGCATTAGCAATCAGGATTGGCTGGCA
TATATCCAAGAACTGCGTAAC

SEQ ID NO.: 464

atgACCCAGTTTGAAGGTTTCACCAATCTGTATCAGGTTAGCAAAACCCT
GCGTTTTGAACTGATTCCGCAGGGTAAAACCCTGAAACATATTCAAGAAC
AGGGCTTCATCGAAGAGGATAAAGCACGTAACGATCACTACAAAGAACTG
AAACCGATTATCGACCGCATCTATAAAACCTATGCAGATCAGTGTCTGCA
GCTGGTTCAGCTGGATTGGGAAAATCTGAGCGCAGCAATTGATAGTTATC
GCAAAGAAAAAACCGAAGAAACCCGTAATGCACTGATTGAAGAACAGGCA
ACCTATCGTAATGCCATCCATGATTATTTCATTGGTCGTACCGATAATCT
GACCGATGCAATTAACAAACGTCACGCCGAAATCTATAAAGGCCTGTTTA
AAGCCGAACTGTTTAATGGCAAAGTTCTGAAACAGCTGGGCACCGTTACC
ACCACCGAACATGAAAATGCACTGCTGCGTAGCTTTGATAAATTCACCAC
CTATTTCAGCGGCTTTTATGAGAATCGCAAAAACGTGTTTAGCGCAGAAG
ATATTAGCACCGCAATTCCGCATCGTATTGTGCAGGATAATTTCCCGAAA
TTCAAAGAGAACTGCCACATTTTTACCCGTCTGATTACCGCAGTTCCGAG
CCTGCGTGAACATTTTGAAAACGTTAAAAAAGCCATCGGCATCTTTGTTA
GCACCAGCATTGAAGAAGTTTTTAGCTTCCCGTTTTACAATCAGCTGCTG
ACCCAGACCCAGATTGATCTGTATAACCAACTGCTGGGTGGTATTAGCCG
TGAAGCAGGCACCGAAAAAATCAAAGGTCTGAATGAAGTGCTGAATCTGG
CCATTCAGAAAAATGATGAAACCGCACATATTATTGCAAGCCTGCCGCAT
CGTTTTATTCCGCTGTTCAAACAAATTCTGAGCGATCGTAATACCCTGAG
CTTTATTCTGGAAGAATTCAAATCCGATGAAGAGGTGATTCAGAGCTTTT
GCAAATACAAAACGCTGCTGCGCAATGAAAATGTTCTGGAAACTGCCGAA
GCACTGTTTAACGAACTGAATAGCATTGATCTGACCCACATCTTTATCAG
CCACAAAAAACTGGAAACCATTTCAAGCGCACTGTGTGATCATTGGGATA
CCCTGCGTAATGCCCTGTATGAACGTCGTATTAGCGAACTGACCGGTAAA
ATTACCAAAAGCGCGAAAGAAAAAGTTCAGCGCAGTCTGAAACATGAGGA
TATTAATCTGCAAGAGATTATTAGCGCAGCCGGTAAAGAACTGTCAGAAG
CATTTAAACAGAAAACCAGCGAAATTCTGTCACATGCACATGCAGCACTG
GATCAGCCGCTGCCGACCACCCTGAAAAAACAAGAAGAAAAAGAAATCCT
GAAAAGCCAGCTGGATAGCCTGCTGGGTCTGTATCATCTGCTGGACTGGT
TTGCAGTTGATGAAAGCAATGAAGTTGATCCGGAATTTAGCGCACGTCTG
ACCGGCATTAAACTGGAAATGGAACCGAGCCTGAGCTTTTATAACAAAGC
CCGTAATTATGCCACCAAAAAACCGTATAGCGTCGAAAAATTCAAACTGA
ACTTTCAGATGCCGACCCTGGCAAGCGGTTGGGATGTTAATAAAGAAAAA
AACAACGGTGCCATCCTGTTCGTGAAAAATGGCCTGTATTATCTGGGTAT
TATGCCGAAACAGAAAGGTCGTTATAAAGCGCTGAGCTTTGAACCGACGG
AAAAAACCAGTGAAGGTTTTGATAAAATGTACTACGACTATTTTCCGGAT
GCAGCCAAAATGATTCCGAAATGTAGCACCCAGCTGAAAGCAGTTACCGC
ACATTTTCAGACCCATACCACCCCGATTCTGCTGAGCAATAACTTTATTG
AACCGCTGGAAATCACCAAAGAGATCTACGATCTGAATAACCCGGAAAAA
GAGCCGAAAAAATTCCAGACCGCATATGCAAAAAAAACCGGTGATCAGAA
AGGTTATCGTGAAGCGCTGTGTAAATGGATTGATTTCACCCGTGATTTTC
TGAGCAAATACACCAAAACCACCAGTATCGATCTGAGCAGCCTGCGTCCG
AGCAGCCAGTATAAAGATCTGGGCGAATATTATGCAGAACTGAATCCGCT
GCTGTATCATATTAGCTTTCAGCGTATTGCCGAGAAAGAAATCATGGACG
CAGTTGAAACCGGTAAACTGTACCTGTTCCAGATCTACAATAAAGATTTT
GCCAAAGGCCATCATGGCAAACCGAATCTGCATACCCTGTATTGGACCGG
TCTGTTTAGCCCTGAAAATCTGGCAAAAACCTCGATTAAACTGAATGGTC
AGGCGGAACTGTTTTATCGTCCGAAAAGCCGTATGAAACGTATGGCACAT
CGTCTGGGTGAAAAAATGCTGAACAAAAAACTGAAAGACCAGAAAACCCC
GATCCCGGATACACTGTATCAAGAACTGTATGATTATGTGAACCATCGTC
TGAGCCATGATCTGAGTGATGAAGCACGTGCCCTGCTGCCGAATGTTATT
ACCAAAGAAGTTAGCCACGAGATCATTAAAGATCGTCGTTTTACCAGCGA
CAAATTCTTTTTTCATGTGCCGATTACCCTGAATTATCAGGCAGCAAATA
GCCCGAGCAAATTTAACCAGCGTGTTAATGCATATCTGAAAGAACATCCA
GAAACGCCGATTATTGGTATTGATCGTGGTGAACGTAACCTGATTTATAT
CACCGTTATTGATAGCACCGGCAAAATCCTGGAACAGCGTAGCCTGAATA
CCATTCAGCAGTTTGATTACCAGAAAAAACTGGATAATCGCGAGAAAGAA
CGTGTTGCAGCACGTCAGGCATGGTCAGTTGTTGGTACAATTAAAGACCT
GAAACAGGGTTATCTGAGCCAGGTTATTCATGAAATTGTGGATCTGATGA
TTCACTATCAGGCCGTTGTTGTGCTGGAAAACCTGAATTTTGGCTTTAAA
AGCAAACGTACCGGCATTGCAGAAAAAGCAGTTTATCAGCAGTTCGAGAA
AATGCTGATTGACAAACTGAATTGCCTGGTGCTGAAAGATTATCCGGCTG
AAAAAGTTGGTGGTGTTCTGAATCCGTATCAGCTGACCGATCAGTTTACC
AGCTTTGCAAAAATGGGCACCCAGAGCGGATTTCTGTTTTATGTTCCGGC
ACCGTATACGAGCAAAATTGATCCGCTGACCGGTTTTGTTGATCCGTTTG
TTTGGAAAACCATCAAAAACCATGAAAGCCGCAAACATTTTCTGGAAGGT
TTCGATTTTCTGCATTACGACGTTAAAACGGGTGATTTCATCCTGCACTT
TAAAATGAATCGCAATCTGAGTTTTCAGCGTGGCCTGCCTGGTTTTATGC
CTGCATGGGATATTGTGTTTGAGAAAAACGAAACACAGTTCGATGCAAAA
GGCACCCCGTTTATTGCAGGTAAACGTATTGTTCCGGTGATTGAAAATCA
TCGTTTCACCGGTCGTTATCGCGATCTGTATCCGGCAAATGAACTGATCG
CACTGCTGGAAGAGAAAGGTATTGTTTTTCGTGATGGCTCAAACATTCTG
CCGAAACTGCTGGAAAATGATGATAGCCATGCAATTGATACCATGGTTGC
ACTGATTCGTAGCGTTCTGCAGATGCGTAATAGCAATGCAGCAACCGGTG
AAGATTACATTAATAGTCCGGTTCGTGATCTGAATGGTGTTTGTTTTGAT
AGCCGTTTTCAGAATCCGGAATGGCCGATGGATGCAGATGCAAATGGTGC
ATATCATATTGCACTGAAAGGACAGCTGCTGCTGAACCACCTGAAAGAAA
GCAAAGATCTGAAACTGCAAAACGGCATTAGCAATCAGGATTGGCTGGCA
TATATCCAAGAACTGCGTAAC

SEQ ID NO.: 465

MTQFEGFTNLYQVSKTLRFELIPQGKTLKHIQEQGFIEEDKARNDHYKEL
KPIIDRIYKTYADQCLQLVQLDWENLSAAIDSYRKEKTEETRNALIEEQA
TYRNAIHDYFIGRTDNLTDAINKRHAEIYKGLFKAELFNGKVLKQLGTVT
TTEHENALLRSFDKFTTYFSGFYENRKNVFSAEDISTAIPHRIVQDNFPK
FKENCHIFTRLITAVPSLREHFENVKKAIGIFVSTSIEEVFSFPFYNQLL
TQTQIDLYNQLLGGISREAGTEKIKGLNEVLNLAIQKNDETAHIIASLPH
RFIPLFKQILSDRNTLSFILEEFKSDEEVIQSFCKYKTLLRNENVLETAE
ALFNELNSIDLTHIFISHKKLETISSALCDHWDTLRNALYERRISELTGK
ITKSAKEKVQRSLKHEDINLQEIISAAGKELSEAFKQKTSEILSHAHAAL
DQPLPTTLKKQEEKEILKSQLDSLLGLYHLLDWFAVDESNEVDPEFSARL
TGIKLEMEPSLSFYNKARNYATKKPYSVEKFKLNFQRPTLASGWDVNKEK
NNGAILFVKNGLYYLGIMPKQKGRYKALSFEPTEKTSEGFDKMYYDYFPD
AAKMIPKCSTQLKAVTAHFQTHTTPILLSNNFIEPLEITKEIYDLNNPEK
EPKKFQTAYAKKTGDQKGYREALCKWIDFTRDFLSKYTKTTSIDLSSLRP
SSQYKDLGEYYAELNPLLYHISFQRIAEKEIMDAVETGKLYLFQIYNKDF
AKGHHGKPNLHTLYWTGLFSPENLAKTSIKLNGQAELFYRPKSRMKRMAH
RLGEKMLNKKLKDQKTPIPDTLYQELYDYVNHRLSHDLSDEARALLPNVI
TKEVSHEIIKDRRFTSDKFLFHVPITLNYQAANSPSKFNQRVNAYLKEHP
ETPIIGIDRGERNLIYITVIDSTGKILEQRSLNTIQQFDYQKKLDNREKE
RVAARQAWSVVGTIKDLKQGYLSQVIHEIVDLMIHYQAVVVLENLNFGFK
SKRTGIAEKAVYQQFEKMLIDKLNCLVLKDYPAEKVGGVLNPYQLTDQFT
SFAKMGTQSGFLFYVPAPYTSKIDPLTGFVDPFVWKTIKNHESRKHFLEG
FDFLHYDVKTGDFILHFKMNRNLSFQRGLPGFMPAWDIVFEKNETQFDAK
GTPFIAGKRIVPVIENHRFTGRYRDLYPANELIALLEEKGIVFRDGSNIL
PKLLENDDSHAIDTMVALIRSVLQMRNSNAATGEDYINSPVRDLNGVCFD
SRFQNPEWPMDADANGAYHIALKGQLLLNHLKESKDLKLQNGISNQDWLA
YIQELRN

SEQ ID NO.: 466

atgACCCAGTTTGAAGGTTTCACCAATCTGTATCAGGTTAGCAAAACCCT
GCGTTTTGAACTGATTCCGCAGGGTAAAACCCTGAAACATATTCAAGAAC
AGGGCTTCATCGAAGAGGATAAAGCACGTAACGATCACTACAAAGAACTG
AAACCGATTATCGACCGCATCTATAAAACCTATGCAGATCAGTGTCTGCA
GCTGGTTCAGCTGGATTGGGAAAATCTGAGCGCAGCAATTGATAGTTATC
GCAAAGAAAAAACCGAAGAAACCCGTAATGCACTGATTGAAGAACAGGCA
ACCTATCGTAATGCCATCCATGATTATTTCATTGGTCGTACCGATAATCT
GACCGATGCAATTAACAAACGTCACGCCGAAATCTATAAAGGCCTGTTTA
AAGCCGAACTGTTTAATGGCAAAGTTCTGAAACAGCTGGGCACCGTTACC
ACCACCGAACATGAAAATGCACTGCTGCGTAGCTTTGATAAATTCACCAC
CTATTTCAGCGGCTTTTATGAGAATCGCAAAAACGTGTTTAGCGCAGAAG
ATATTAGCACCGCAATTCCGCATCGTATTGTGCAGGATAATTTCCCGAAA
TTCAAAGAGAACTGCCACATTTTTACCCGTCTGATTACCGCAGTTCCGAG
CCTGCGTGAACATTTTGAAAACGTTAAAAAAGCCATCGGCATCTTTGTTA
GCACCAGCATTGAAGAAGTTTTTAGCTTCCCGTTTTACAATCAGCTGCTG
ACCCAGACCCAGATTGATCTGTATAACCAACTGCTGGGTGGTATTAGCCG
TGAAGCAGGCACCGAAAAAATCAAAGGTCTGAATGAAGTGCTGAATCTGG
CCATTCAGAAAAATGATGAAACCGCACATATTATTGCAAGCCTGCCGCAT
CGTTTTATTCCGCTGTTCAAACAAATTCTGAGCGATCGTAATACCCTGAG
CTTTATTCTGGAAGAATTCAAATCCGATGAAGAGGTGATTCAGAGCTTTT
GCAAATACAAAACGCTGCTGCGCAATGAAAATGTTCTGGAAACTGCCGAA
GCACTGTTTAACGAACTGAATAGCATTGATCTGACCCACATCTTTATCAG
CCACAAAAAACTGGAAACCATTTCAAGCGCACTGTGTGATCATTGGGATA
CCCTGCGTAATGCCCTGTATGAACGTCGTATTAGCGAACTGACCGGTAAA
ATTACCAAAAGCGCGAAAGAAAAAGTTCAGCGCAGTCTGAAACATGAGGA
TATTAATCTGCAAGAGATTATTAGCGCAGCCGGTAAAGAACTGTCAGAAG
CATTTAAACAGAAAACCAGCGAAATTCTGTCACATGCACATGCAGCACTG
GATCAGCCGCTGCCGACCACCCTGAAAAAACAAGAAGAAAAAGAAATCCT
GAAAAGCCAGCTGGATAGCCTGCTGGGTCTGTATCATCTGCTGGACTGGT
TTGCAGTTGATGAAAGCAATGAAGTTGATCCGGAATTTAGCGCACGTCTG
ACCGGCATTAAACTGGAAATGGAACCGAGCCTGAGCTTTTATAACAAAGC
CCGTAATTATGCCACCAAAAAACCGTATAGCGTCGAAAAATTCAAACTGA
ACTTTCAGCGTCCGACCCTGGCAAGCGGTTGGGATGTTAATAAAGAAAAA
AACAACGGTGCCATCCTGTTCGTGAAAAATGGCCTGTATTATCTGGGTAT
TATGCCGAAACAGAAAGGTCGTTATAAAGCGCTGAGCTTTGAACCGACGG
AAAAAACCAGTGAAGGTTTTGATAAAATGTACTACGACTATTTTCCGGAT
GCAGCCAAAATGATTCCGAAATGTAGCACCCAGCTGAAAGCAGTTACCGC
ACATTTTCAGACCCATACCACCCCGATTCTGCTGAGCAATAACTTTATTG
AACCGCTGGAAATCACCAAAGAGATCTACGATCTGAATAACCCGGAAAAA
GAGCCGAAAAAATTCCAGACCGCATATGCAAAAAAAACCGGTGATCAGAA
AGGTTATCGTGAAGCGCTGTGTAAATGGATTGATTTCACCCGTGATTTTC
TGAGCAAATACACCAAAACCACCAGTATCGATCTGAGCAGCCTGCGTCCG
AGCAGCCAGTATAAAGATCTGGGCGAATATTATGCAGAACTGAATCCGCT
GCTGTATCATATTAGCTTTCAGCGTATTGCCGAGAAAGAAATCATGGACG
CAGTTGAAACCGGTAAACTGTACCTGTTCCAGATCTACAATAAAGATTTT
GCCAAAGGCCATCATGGCAAACCGAATCTGCATACCCTGTATTGGACCGG
TCTGTTTAGCCCTGAAAATCTGGCAAAAACCTCGATTAAACTGAATGGTC
AGGCGGAACTGTTTTATCGTCCGAAAAGCCGTATGAAACGTATGGCACAT
CGTCTGGGTGAAAAAATGCTGAACAAAAAACTGAAAGACCAGAAAACCCC
GATCCCGGATACACTGTATCAAGAACTGTATGATTATGTGAACCATCGTC
TGAGCCATGATCTGAGTGATGAAGCACGTGCCCTGCTGCCGAATGTTATT
ACCAAAGAAGTTAGCCACGAGATCATTAAAGATCGTCGTTTTACCAGCGA
CAAATTCCTGTTTCATGTGCCGATTACCCTGAATTATCAGGCAGCAAATA
GCCCGAGCAAATTTAACCAGCGTGTTAATGCATATCTGAAAGAACATCCA
GAAACGCCGATTATTGGTATTGATCGTGGTGAACGTAACCTGATTTATAT
CACCGTTATTGATAGCACCGGCAAAATCCTGGAACAGCGTAGCCTGAATA
CCATTCAGCAGTTTGATTACCAGAAAAAACTGGATAATCGCGAGAAAGAA
CGTGTTGCAGCACGTCAGGCATGGTCAGTTGTTGGTACAATTAAAGACCT
GAAACAGGGTTATCTGAGCCAGGTTATTCATGAAATTGTGGATCTGATGA
TTCACTATCAGGCCGTTGTTGTGCTGGAAAACCTGAATTTTGGCTTTAAA
AGCAAACGTACCGGCATTGCAGAAAAAGCAGTTTATCAGCAGTTCGAGAA
AATGCTGATTGACAAACTGAATTGCCTGGTGCTGAAAGATTATCCGGCTG
AAAAAGTTGGTGGTGTTCTGAATCCGTATCAGCTGACCGATCAGTTTACC
AGCTTTGCAAAAATGGGCACCCAGAGCGGATTTCTGTTTTATGTTCCGGC
ACCGTATACGAGCAAAATTGATCCGCTGACCGGTTTTGTTGATCCGTTTG
TTTGGAAAACCATCAAAAACCATGAAAGCCGCAAACATTTTCTGGAAGGT
TTCGATTTTCTGCATTACGACGTTAAAACGGGTGATTTCATCCTGCACTT
TAAAATGAATCGCAATCTGAGTTTTCAGCGTGGCCTGCCTGGTTTTATGC
CTGCATGGGATATTGTGTTTGAGAAAAACGAAACACAGTTCGATGCAAAA
GGCACCCCGTTTATTGCAGGTAAACGTATTGTTCCGGTGATTGAAAATCA
TCGTTTCACCGGTCGTTATCGCGATCTGTATCCGGCAAATGAACTGATCG
CACTGCTGGAAGAGAAAGGTATTGTTTTTCGTGATGGCTCAAACATTCTG
CCGAAACTGCTGGAAAATGATGATAGCCATGCAATTGATACCATGGTTGC
ACTGATTCGTAGCGTTCTGCAGATGCGTAATAGCAATGCAGCAACCGGTG
AAGATTACATTAATAGTCCGGTTCGTGATCTGAATGGTGTTTGTTTTGAT
AGCCGTTTTCAGAATCCGGAATGGCCGATGGATGCAGATGCAAATGGTGC
ATATCATATTGCACTGAAAGGACAGCTGCTGCTGAACCACCTGAAAGAAA
GCAAAGATCTGAAACTGCAAAACGGCATTAGCAATCAGGATTGGCTGGCA
TATATCCAAGAACTGCGTAAC

SEQ ID NO.: 467

atgACCCAGTTTGAAGGTTTCACCAATCTGTATCAGGTTAGCAAAACCCT
GCGTTTTGAACTGATTCCGCAGGGTAAAACCCTGAAACATATTCAAGAAC
AGGGCTTCATCGAAGAGGATAAAGCACGTAACGATCACTACAAAGAACTG
AAACCGATTATCGACCGCATCTATAAAACCTATGCAGATCAGTGTCTGCA
GCTGGTTCAGCTGGATTGGGAAAATCTGAGCGCAGCAATTGATAGTTATC
GCAAAGAAAAAACCGAAGAAACCCGTAATGCACTGATTGAAGAACAGGCA
ACCTATCGTAATGCCATCCATGATTATTTCATTGGTCGTACCGATAATCT
GACCGATGCAATTAACAAACGTCACGCCGAAATCTATAAAGGCCTGTTTA
AAGCCGAACTGTTTAATGGCAAAGTTCTGAAACAGCTGGGCACCGTTACC
ACCACCGAACATGAAAATGCACTGCTGCGTAGCTTTGATAAATTCACCAC
CTATTTCAGCGGCTTTTATGAGAATCGCAAAAACGTGTTTAGCGCAGAAG
ATATTAGCACCGCAATTCCGCATCGTATTGTGCAGGATAATTTCCCGAAA
TTCAAAGAGAACTGCCACATTTTTACCCGTCTGATTACCGCAGTTCCGAG
CCTGCGTGAACATTTTGAAAACGTTAAAAAAGCCATCGGCATCTTTGTTA
GCACCAGCATTGAAGAAGTTTTTAGCTTCCCGTTTTACAATCAGCTGCTG
ACCCAGACCCAGATTGATCTGTATAACCAACTGCTGGGTGGTATTAGCCG
TGAAGCAGGCACCGAAAAAATCAAAGGTCTGAATGAAGTGCTGAATCTGG
CCATTCAGAAAAATGATGAAACCGCACATATTATTGCAAGCCTGCCGCAT
CGTTTTATTCCGCTGTTCAAACAAATTCTGAGCGATCGTAATACCCTGAG
CTTTATTCTGGAAGAATTCAAATCCGATGAAGAGGTGATTCAGAGCTTTT
GCAAATACAAAACGCTGCTGCGCAATGAAAATGTTCTGGAAACTGCCGAA
GCACTGTTTAACGAACTGAATAGCATTGATCTGACCCACATCTTTATCAG
CCACAAAAAACTGGAAACCATTTCAAGCGCACTGTGTGATCATTGGGATA
CCCTGCGTAATGCCCTGTATGAACGTCGTATTAGCGAACTGACCGGTAAA
ATTACCAAAAGCGCGAAAGAAAAAGTTCAGCGCAGTCTGAAACATGAGGA
TATTAATCTGCAAGAGATTATTAGCGCAGCCGGTAAAGAACTGTCAGAAG
CATTTAAACAGAAAACCAGCGAAATTCTGTCACATGCACATGCAGCACTG
GATCAGCCGCTGCCGACCACCCTGAAAAAACAAGAAGAAAAAGAAATCCT
GAAAAGCCAGCTGGATAGCCTGCTGGGTCTGTATCATCTGCTGGACTGGT
TTGCAGTTGATGAAAGCAATGAAGTTGATCCGGAATTTAGCGCACGTCTG
ACCGGCATTAAACTGGAAATGGAACCGAGCCTGAGCTTTTATAACAAAGC
CCGTAATTATGCCACCAAAAAACCGTATAGCGTCGAAAAATTCAAACTGA
ACTTTCAGCGTCCGACCCTGGCAAGCGGTTGGGATGTTAATAAAGAAAAA
AACAACGGTGCCATCCTGTTCGTGAAAAATGGCCTGTATTATCTGGGTAT
TATGCCGAAACAGAAAGGTCGTTATAAAGCGCTGAGCTTTGAACCGACGG
AAAAAACCAGTGAAGGTTTTGATAAAATGTACTACGACTATTTTCCGGAT
GCAGCCAAAATGATTCCGAAATGTAGCACCCAGCTGAAAGCAGTTACCGC
ACATTTTCAGACCCATACCACCCCGATTCTGCTGAGCAATAACTTTATTG
AACCGCTGGAAATCACCAAAGAGATCTACGATCTGAATAACCCGGAAAAA
GAGCCGAAAAAATTCCAGACCGCATATGCAAAAAAAACCGGTGATCAGAA
AGGTTATCGTGAAGCGCTGTGTAAATGGATTGATTTCACCCGTGATTTTC
TGAGCAAATACACCAAAACCACCAGTATCGATCTGAGCAGCCTGCGTCCG
AGCAGCCAGTATAAAGATCTGGGCGAATATTATGCAGAACTGAATCCGCT
GCTGTATCATATTAGCTTTCAGCGTATTGCCGAGAAAGAAATCATGGACG
CAGTTGAAACCGGTAAACTGTACCTGTTCCAGATCTACAATAAAGATTTT
GCCAAAGGCCATCATGGCAAACCGAATCTGCATACCCTGTATTGGACCGG
TCTGTTTAGCCCTGAAAATCTGGCAAAAACCTCGATTAAACTGAATGGTC
AGGCGGAACTGTTTTATCGTCCGAAAAGCCGTATGAAACGTATGGCACAT
CGTCTGGGTGAAAAAATGCTGAACAAAAAACTGAAAGACCAGAAAACCCC
GATCCCGGATACACTGTATCAAGAACTGTATGATTATGTGAACCATCGTC
TGAGCCATGATCTGAGTGATGAAGCACGTGCCCTGCTGCCGAATGTTATT
ACCAAAGAAGTTAGCCACGAGATCATTAAAGATCGTCGTTTTACCAGCGA
CAAATTCCTGTTTCATGTGCCGATTACCCTGAATTATCAGGCAGCAAATA
GCCCGAGCAAATTTAACCAGCGTGTTAATGCATATCTGAAAGAACATCCA
GAAACGCCGATTATTGGTATTGATCGTGGTGAACGTAACCTGATTTATAT
CACCGTTATTGATAGCACCGGCAAAATCCTGGAACAGCGTAGCCTGAATA
CCATTCAGCAGTTTGATTACCAGAAAAAACTGGATAATCGCGAGAAAGAA
CGTGTTGCAGCACGTCAGGCATGGTCAGTTGTTGGTACAATTAAAGACCT
GAAACAGGGTTATCTGAGCCAGGTTATTCATGAAATTGTGGATCTGATGA
TTCACTATCAGGCCGTTGTTGTGCTGGAAAACCTGAATTTTGGCTTTAAA
AGCAAACGTACCGGCATTGCAGAAAAAGCAGTTTATCAGCAGTTCGAGAA
AATGCTGATTGACAAACTGAATTGCCTGGTGCTGAAAGATTATCCGGCTG
AAAAAGTTGGTGGTGTTCTGAATCCGTATCAGCTGACCGATCAGTTTACC
AGCTTTGCAAAAATGGGCACCCAGAGCGGATTTCTGTTTTATGTTCCGGC
ACCGTATACGAGCAAAATTGATCCGCTGACCGGTTTTGTTGATCCGTTTG
TTTGGAAAACCATCAAAAACCATGAAAGCCGCAAACATTTTCTGGAAGGT
TTCGATTTTCTGCATTACGACGTTAAAACGGGTGATTTCATCCTGCACTT
TAAAATGAATCGCAATCTGAGTTTTCAGCGTGGCCTGCCTGGTTTTATGC
CTGCATGGGATATTGTGTTTGAGAAAAACGAAACACAGTTCGATGCAAAA
GGCACCCCGTTTATTGCAGGTAAACGTATTGTTCCGGTGATTGAAAATCA
TCGTTTCACCGGTCGTTATCGCGATCTGTATCCGGCAAATGAACTGATCG
CACTGCTGGAAGAGAAAGGTATTGTTTTTCGTGATGGCTCAAACATTCTG
CCGAAACTGCTGGAAAATGATGATAGCCATGCAATTGATACCATGGTTGC
ACTGATTCGTAGCGTTCTGCAGATGCGTAATAGCAATGCAGCAACCGGTG
AAGATTACATTAATAGTCCGGTTCGTGATCTGAATGGTGTTTGTTTTGAT
AGCCGTTTTCAGAATCCGGAATGGCCGATGGATGCAGATGCAAATGGTGC
ATATCATATTGCACTGAAAGGACAGCTGCTGCTGAACCACCTGAAAGAAA
GCAAAGATCTGAAACTGCAAAACGGCATTAGCAATCAGGATTGGCTGGCA
TATATCCAAGAACTGCGTAAC

[0109] Additional polynucleotides and polypeptides relevant to this Example include Cas12a variants having single amino acid substitution at M537R and F870L, as shown below. The underlined codons or amino acids correspond to the changes relative to the corresponding WT Cas12a sequences.

SEQ ID NO.: 468
E. coli optimized DNA M537R
atgACCCAGTTTGAAGGTTTCACCAATCTGTATCAGGTTAGCAAAACCCTGCGTTTTGAACTG
ATTCCGCAGGGTAAAACCCTGAAACATATTCAAGAACAGGGCTTCATCGAAGAGGATAAAGCACGTAACGAT
CACTACAAAGAACTGAAACCGATTATCGACCGCATCTATAAAACCTATGCAGATCAGTGTCTGCAGCTGGTTC
AGCTGGATTGGGAAAATCTGAGCGCAGCAATTGATAGTTATCGCAAAGAAAAAACCGAAGAAACCCGTAATG
CACTGATTGAAGAACAGGCAACCTATCGTAATGCCATCCATGATTATTTCATTGGTCGTACCGATAATCTGACC
GATGCAATTAACAAACGTCACGCCGAAATCTATAAAGGCCTGTTTAAAGCCGAACTGTTTAATGGCAAAGTTC
TGAAACAGCTGGGCACCGTTACCACCACCGAACATGAAAATGCACTGCTGCGTAGCTTTGATAAATTCACCAC
CTATTTCAGCGGCTTTTATGAGAATCGCAAAAACGTGTTTAGCGCAGAAGATATTAGCACCGCAATTCCGCAT
CGTATTGTGCAGGATAATTTCCCGAAATTCAAAGAGAACTGCCACATTTTTACCCGTCTGATTACCGCAGTTCC
GAGCCTGCGTGAACATTTTGAAAACGTTAAAAAAGCCATCGGCATCTTTGTTAGCACCAGCATTGAAGAAGTT
TTTAGCTTCCCGTTTTACAATCAGCTGCTGACCCAGACCCAGATTGATCTGTATAACCAACTGCTGGGTGGTAT
TAGCCGTGAAGCAGGCACCGAAAAAATCAAAGGTCTGAATGAAGTGCTGAATCTGGCCATTCAGAAAAATGA
TGAAACCGCACATATTATTGCAAGCCTGCCGCATCGTTTTATTCCGCTGTTCAAACAAATTCTGAGCGATCGTA
ATACCCTGAGCTTTATTCTGGAAGAATTCAAATCCGATGAAGAGGTGATTCAGAGCTTTTGCAAATACAAAAC
GCTGCTGCGCAATGAAAATGTTCTGGAAACTGCCGAAGCACTGTTTAACGAACTGAATAGCATTGATCTGACC
CACATCTTTATCAGCCACAAAAAACTGGAAACCATTTCAAGCGCACTGTGTGATCATTGGGATACCCTGCGTA
ATGCCCTGTATGAACGTCGTATTAGCGAACTGACCGGTAAAATTACCAAAAGCGCGAAAGAAAAAGTTCAGC
GCAGTCTGAAACATGAGGATATTAATCTGCAAGAGATTATTAGCGCAGCCGGTAAAGAACTGTCAGAAGCAT
TTAAACAGAAAACCAGCGAAATTCTGTCACATGCACATGCAGCACTGGATCAGCCGCTGCCGACCACCCTGAA
AAAACAAGAAGAAAAAGAAATCCTGAAAAGCCAGCTGGATAGCCTGCTGGGTCTGTATCATCTGCTGGACTG
GTTTGCAGTTGATGAAAGCAATGAAGTTGATCCGGAATTTAGCGCACGTCTGACCGGCATTAAACTGGAAAT
GGAACCGAGCCTGAGCTTTTATAACAAAGCCCGTAATTATGCCACCAAAAAACCGTATAGCGTCGAAAAATTC
AAACTGAACTTTCAGCGTCCGACCCTGGCAAGCGGTTGGGATGTTAATAAAGAAAAAAACAACGGTGCCATC
CTGTTCGTGAAAAATGGCCTGTATTATCTGGGTATTATGCCGAAACAGAAAGGTCGTTATAAAGCGCTGAGCT
TTGAACCGACGGAAAAAACCAGTGAAGGTTTTGATAAAATGTACTACGACTATTTTCCGGATGCAGCCAAAAT
GATTCCGAAATGTAGCACCCAGCTGAAAGCAGTTACCGCACATTTTCAGACCCATACCACCCCGATTCTGCTGA
GCAATAACTTTATTGAACCGCTGGAAATCACCAAAGAGATCTACGATCTGAATAACCCGGAAAAAGAGCCGA
AAAAATTCCAGACCGCATATGCAAAAAAAACCGGTGATCAGAAAGGTTATCGTGAAGCGCTGTGTAAATGGA
TTGATTTCACCCGTGATTTTCTGAGCAAATACACCAAAACCACCAGTATCGATCTGAGCAGCCTGCGTCCGAGC
AGCCAGTATAAAGATCTGGGCGAATATTATGCAGAACTGAATCCGCTGCTGTATCATATTAGCTTTCAGCGTA
TTGCCGAGAAAGAAATCATGGACGCAGTTGAAACCGGTAAACTGTACCTGTTCCAGATCTACAATAAAGATTT
TGCCAAAGGCCATCATGGCAAACCGAATCTGCATACCCTGTATTGGACCGGTCTGTTTAGCCCTGAAAATCTG
GCAAAAACCTCGATTAAACTGAATGGTCAGGCGGAACTGTTTTATCGTCCGAAAAGCCGTATGAAACGTATG
GCACATCGTCTGGGTGAAAAAATGCTGAACAAAAAACTGAAAGACCAGAAAACCCCGATCCCGGATACACTG
TATCAAGAACTGTATGATTATGTGAACCATCGTCTGAGCCATGATCTGAGTGATGAAGCACGTGCCCTGCTGC
CGAATGTTATTACCAAAGAAGTTAGCCACGAGATCATTAAAGATCGTCGTTTTACCAGCGACAAATTCTTTTTT
CATGTGCCGATTACCCTGAATTATCAGGCAGCAAATAGCCCGAGCAAATTTAACCAGCGTGTTAATGCATATC
TGAAAGAACATCCAGAAACGCCGATTATTGGTATTGATCGTGGTGAACGTAACCTGATTTATATCACCGTTATT
GATAGCACCGGCAAAATCCTGGAACAGCGTAGCCTGAATACCATTCAGCAGTTTGATTACCAGAAAAAACTG
GATAATCGCGAGAAAGAACGTGTTGCAGCACGTCAGGCATGGTCAGTTGTTGGTACAATTAAAGACCTGAAA
CAGGGTTATCTGAGCCAGGTTATTCATGAAATTGTGGATCTGATGATTCACTATCAGGCCGTTGTTGTGCTGG
AAAACCTGAATTTTGGCTTTAAAAGCAAACGTACCGGCATTGCAGAAAAAGCAGTTTATCAGCAGTTCGAGAA
AATGCTGATTGACAAACTGAATTGCCTGGTGCTGAAAGATTATCCGGCTGAAAAAGTTGGTGGTGTTCTGAAT
CCGTATCAGCTGACCGATCAGTTTACCAGCTTTGCAAAAATGGGCACCCAGAGCGGATTTCTGTTTTATGTTCC
GGCACCGTATACGAGCAAAATTGATCCGCTGACCGGTTTTGTTGATCCGTTTGTTTGGAAAACCATCAAAAAC
CATGAAAGCCGCAAACATTTTCTGGAAGGTTTCGATTTTCTGCATTACGACGTTAAAACGGGTGATTTCATCCT
GCACTTTAAAATGAATCGCAATCTGAGTTTTCAGCGTGGCCTGCCTGGTTTTATGCCTGCATGGGATATTGTGT
TTGAGAAAAACGAAACACAGTTCGATGCAAAAGGCACCCCGTTTATTGCAGGTAAACGTATTGTTCCGGTGAT
TGAAAATCATCGTTTCACCGGTCGTTATCGCGATCTGTATCCGGCAAATGAACTGATCGCACTGCTGGAAGAG
AAAGGTATTGTTTTTCGTGATGGCTCAAACATTCTGCCGAAACTGCTGGAAAATGATGATAGCCATGCAATTG
ATACCATGGTTGCACTGATTCGTAGCGTTCTGCAGATGCGTAATAGCAATGCAGCAACCGGTGAAGATTACAT
TAATAGTCCGGTTCGTGATCTGAATGGTGTTTGTTTTGATAGCCGTTTTCAGAATCCGGAATGGCCGATGGAT
GCAGATGCAAATGGTGCATATCATATTGCACTGAAAGGACAGCTGCTGCTGAACCACCTGAAAGAAAGCAAA
GATCTGAAACTGCAAAACGGCATTAGCAATCAGGATTGGCTGGCATATATCCAAGAACTGCGTAAC
SEQ ID NO.: 469
E. coli optimized DNA F870L Cas12a
atgACCCAGTTTGAAGGTTTCACCAATCTGTATCAGGTTAGCAAAACCCTGCGTTTTGAACTG
ATTCCGCAGGGTAAAACCCTGAAACATATTCAAGAACAGGGCTTCATCGAAGAGGATAAAGCACGTAACGAT
CACTACAAAGAACTGAAACCGATTATCGACCGCATCTATAAAACCTATGCAGATCAGTGTCTGCAGCTGGTTC
AGCTGGATTGGGAAAATCTGAGCGCAGCAATTGATAGTTATCGCAAAGAAAAAACCGAAGAAACCCGTAATG
CACTGATTGAAGAACAGGCAACCTATCGTAATGCCATCCATGATTATTTCATTGGTCGTACCGATAATCTGACC
GATGCAATTAACAAACGTCACGCCGAAATCTATAAAGGCCTGTTTAAAGCCGAACTGTTTAATGGCAAAGTTC
TGAAACAGCTGGGCACCGTTACCACCACCGAACATGAAAATGCACTGCTGCGTAGCTTTGATAAATTCACCAC
CTATTTCAGCGGCTTTTATGAGAATCGCAAAAACGTGTTTAGCGCAGAAGATATTAGCACCGCAATTCCGCAT
CGTATTGTGCAGGATAATTTCCCGAAATTCAAAGAGAACTGCCACATTTTTACCCGTCTGATTACCGCAGTTCC
GAGCCTGCGTGAACATTTTGAAAACGTTAAAAAAGCCATCGGCATCTTTGTTAGCACCAGCATTGAAGAAGTT
TTTAGCTTCCCGTTTTACAATCAGCTGCTGACCCAGACCCAGATTGATCTGTATAACCAACTGCTGGGTGGTAT
TAGCCGTGAAGCAGGCACCGAAAAAATCAAAGGTCTGAATGAAGTGCTGAATCTGGCCATTCAGAAAAATGA
TGAAACCGCACATATTATTGCAAGCCTGCCGCATCGTTTTATTCCGCTGTTCAAACAAATTCTGAGCGATCGTA
ATACCCTGAGCTTTATTCTGGAAGAATTCAAATCCGATGAAGAGGTGATTCAGAGCTTTTGCAAATACAAAAC
GCTGCTGCGCAATGAAAATGTTCTGGAAACTGCCGAAGCACTGTTTAACGAACTGAATAGCATTGATCTGACC
CACATCTTTATCAGCCACAAAAAACTGGAAACCATTTCAAGCGCACTGTGTGATCATTGGGATACCCTGCGTA
ATGCCCTGTATGAACGTCGTATTAGCGAACTGACCGGTAAAATTACCAAAAGCGCGAAAGAAAAAGTTCAGC
GCAGTCTGAAACATGAGGATATTAATCTGCAAGAGATTATTAGCGCAGCCGGTAAAGAACTGTCAGAAGCAT
TTAAACAGAAAACCAGCGAAATTCTGTCACATGCACATGCAGCACTGGATCAGCCGCTGCCGACCACCCTGAA
AAAACAAGAAGAAAAAGAAATCCTGAAAAGCCAGCTGGATAGCCTGCTGGGTCTGTATCATCTGCTGGACTG
GTTTGCAGTTGATGAAAGCAATGAAGTTGATCCGGAATTTAGCGCACGTCTGACCGGCATTAAACTGGAAAT
GGAACCGAGCCTGAGCTTTTATAACAAAGCCCGTAATTATGCCACCAAAAAACCGTATAGCGTCGAAAAATTC
AAACTGAACTTTCAGATGCCGACCCTGGCAAGCGGTTGGGATGTTAATAAAGAAAAAAACAACGGTGCCATC
CTGTTCGTGAAAAATGGCCTGTATTATCTGGGTATTATGCCGAAACAGAAAGGTCGTTATAAAGCGCTGAGCT
TTGAACCGACGGAAAAAACCAGTGAAGGTTTTGATAAAATGTACTACGACTATTTTCCGGATGCAGCCAAAAT
GATTCCGAAATGTAGCACCCAGCTGAAAGCAGTTACCGCACATTTTCAGACCCATACCACCCCGATTCTGCTGA
GCAATAACTTTATTGAACCGCTGGAAATCACCAAAGAGATCTACGATCTGAATAACCCGGAAAAAGAGCCGA
AAAAATTCCAGACCGCATATGCAAAAAAAACCGGTGATCAGAAAGGTTATCGTGAAGCGCTGTGTAAATGGA
TTGATTTCACCCGTGATTTTCTGAGCAAATACACCAAAACCACCAGTATCGATCTGAGCAGCCTGCGTCCGAGC
AGCCAGTATAAAGATCTGGGCGAATATTATGCAGAACTGAATCCGCTGCTGTATCATATTAGCTTTCAGCGTA
TTGCCGAGAAAGAAATCATGGACGCAGTTGAAACCGGTAAACTGTACCTGTTCCAGATCTACAATAAAGATTT
TGCCAAAGGCCATCATGGCAAACCGAATCTGCATACCCTGTATTGGACCGGTCTGTTTAGCCCTGAAAATCTG
GCAAAAACCTCGATTAAACTGAATGGTCAGGCGGAACTGTTTTATCGTCCGAAAAGCCGTATGAAACGTATG
GCACATCGTCTGGGTGAAAAAATGCTGAACAAAAAACTGAAAGACCAGAAAACCCCGATCCCGGATACACTG
TATCAAGAACTGTATGATTATGTGAACCATCGTCTGAGCCATGATCTGAGTGATGAAGCACGTGCCCTGCTGC
CGAATGTTATTACCAAAGAAGTTAGCCACGAGATCATTAAAGATCGTCGTTTTACCAGCGACAAATTCCTGTTT
CATGTGCCGATTACCCTGAATTATCAGGCAGCAAATAGCCCGAGCAAATTTAACCAGCGTGTTAATGCATATC
TGAAAGAACATCCAGAAACGCCGATTATTGGTATTGATCGTGGTGAACGTAACCTGATTTATATCACCGTTATT
GATAGCACCGGCAAAATCCTGGAACAGCGTAGCCTGAATACCATTCAGCAGTTTGATTACCAGAAAAAACTG
GATAATCGCGAGAAAGAACGTGTTGCAGCACGTCAGGCATGGTCAGTTGTTGGTACAATTAAAGACCTGAAA
CAGGGTTATCTGAGCCAGGTTATTCATGAAATTGTGGATCTGATGATTCACTATCAGGCCGTTGTTGTGCTGG
AAAACCTGAATTTTGGCTTTAAAAGCAAACGTACCGGCATTGCAGAAAAAGCAGTTTATCAGCAGTTCGAGAA
AATGCTGATTGACAAACTGAATTGCCTGGTGCTGAAAGATTATCCGGCTGAAAAAGTTGGTGGTGTTCTGAAT
CCGTATCAGCTGACCGATCAGTTTACCAGCTTTGCAAAAATGGGCACCCAGAGCGGATTTCTGTTTTATGTTCC
GGCACCGTATACGAGCAAAATTGATCCGCTGACCGGTTTTGTTGATCCGTTTGTTTGGAAAACCATCAAAAAC
CATGAAAGCCGCAAACATTTTCTGGAAGGTTTCGATTTTCTGCATTACGACGTTAAAACGGGTGATTTCATCCT
GCACTTTAAAATGAATCGCAATCTGAGTTTTCAGCGTGGCCTGCCTGGTTTTATGCCTGCATGGGATATTGTGT
TTGAGAAAAACGAAACACAGTTCGATGCAAAAGGCACCCCGTTTATTGCAGGTAAACGTATTGTTCCGGTGAT
TGAAAATCATCGTTTCACCGGTCGTTATCGCGATCTGTATCCGGCAAATGAACTGATCGCACTGCTGGAAGAG
AAAGGTATTGTTTTTCGTGATGGCTCAAACATTCTGCCGAAACTGCTGGAAAATGATGATAGCCATGCAATTG
ATACCATGGTTGCACTGATTCGTAGCGTTCTGCAGATGCGTAATAGCAATGCAGCAACCGGTGAAGATTACAT
TAATAGTCCGGTTCGTGATCTGAATGGTGTTTGTTTTGATAGCCGTTTTCAGAATCCGGAATGGCCGATGGAT
GCAGATGCAAATGGTGCATATCATATTGCACTGAAAGGACAGCTGCTGCTGAACCACCTGAAAGAAAGCAAA
GATCTGAAACTGCAAAACGGCATTAGCAATCAGGATTGGCTGGCATATATCCAAGAACTGCGTAAC
SEQ ID NO.: 470
Human optimized DNA M537R Cas12a
atgACCCAGTTTGAAGGTTTCACCAATCTGTATCAGGTTAGCAAAACCCTGCGTTTTGAACTG
ATTCCGCAGGGTAAAACCCTGAAACATATTCAAGAACAGGGCTTCATCGAAGAGGATAAAGCACGTAACGAT
CACTACAAAGAACTGAAACCGATTATCGACCGCATCTATAAAACCTATGCAGATCAGTGTCTGCAGCTGGTTC
AGCTGGATTGGGAAAATCTGAGCGCAGCAATTGATAGTTATCGCAAAGAAAAAACCGAAGAAACCCGTAATG
CACTGATTGAAGAACAGGCAACCTATCGTAATGCCATCCATGATTATTTCATTGGTCGTACCGATAATCTGACC
GATGCAATTAACAAACGTCACGCCGAAATCTATAAAGGCCTGTTTAAAGCCGAACTGTTTAATGGCAAAGTTC
TGAAACAGCTGGGCACCGTTACCACCACCGAACATGAAAATGCACTGCTGCGTAGCTTTGATAAATTCACCAC
CTATTTCAGCGGCTTTTATGAGAATCGCAAAAACGTGTTTAGCGCAGAAGATATTAGCACCGCAATTCCGCAT
CGTATTGTGCAGGATAATTTCCCGAAATTCAAAGAGAACTGCCACATTTTTACCCGTCTGATTACCGCAGTTCC
GAGCCTGCGTGAACATTTTGAAAACGTTAAAAAAGCCATCGGCATCTTTGTTAGCACCAGCATTGAAGAAGTT
TTTAGCTTCCCGTTTTACAATCAGCTGCTGACCCAGACCCAGATTGATCTGTATAACCAACTGCTGGGTGGTAT
TAGCCGTGAAGCAGGCACCGAAAAAATCAAAGGTCTGAATGAAGTGCTGAATCTGGCCATTCAGAAAAATGA
TGAAACCGCACATATTATTGCAAGCCTGCCGCATCGTTTTATTCCGCTGTTCAAACAAATTCTGAGCGATCGTA
ATACCCTGAGCTTTATTCTGGAAGAATTCAAATCCGATGAAGAGGTGATTCAGAGCTTTTGCAAATACAAAAC
GCTGCTGCGCAATGAAAATGTTCTGGAAACTGCCGAAGCACTGTTTAACGAACTGAATAGCATTGATCTGACC
CACATCTTTATCAGCCACAAAAAACTGGAAACCATTTCAAGCGCACTGTGTGATCATTGGGATACCCTGCGTA
ATGCCCTGTATGAACGTCGTATTAGCGAACTGACCGGTAAAATTACCAAAAGCGCGAAAGAAAAAGTTCAGC
GCAGTCTGAAACATGAGGATATTAATCTGCAAGAGATTATTAGCGCAGCCGGTAAAGAACTGTCAGAAGCAT
TTAAACAGAAAACCAGCGAAATTCTGTCACATGCACATGCAGCACTGGATCAGCCGCTGCCGACCACCCTGAA
AAAACAAGAAGAAAAAGAAATCCTGAAAAGCCAGCTGGATAGCCTGCTGGGTCTGTATCATCTGCTGGACTG
GTTTGCAGTTGATGAAAGCAATGAAGTTGATCCGGAATTTAGCGCACGTCTGACCGGCATTAAACTGGAAAT
GGAACCGAGCCTGAGCTTTTATAACAAAGCCCGTAATTATGCCACCAAAAAACCGTATAGCGTCGAAAAATTC
AAACTGAACTTTCAGCGTCCGACCCTGGCAAGCGGTTGGGATGTTAATAAAGAAAAAAACAACGGTGCCATC
CTGTTCGTGAAAAATGGCCTGTATTATCTGGGTATTATGCCGAAACAGAAAGGTCGTTATAAAGCGCTGAGCT
TTGAACCGACGGAAAAAACCAGTGAAGGTTTTGATAAAATGTACTACGACTATTTTCCGGATGCAGCCAAAAT
GATTCCGAAATGTAGCACCCAGCTGAAAGCAGTTACCGCACATTTTCAGACCCATACCACCCCGATTCTGCTGA
GCAATAACTTTATTGAACCGCTGGAAATCACCAAAGAGATCTACGATCTGAATAACCCGGAAAAAGAGCCGA
AAAAATTCCAGACCGCATATGCAAAAAAAACCGGTGATCAGAAAGGTTATCGTGAAGCGCTGTGTAAATGGA
TTGATTTCACCCGTGATTTTCTGAGCAAATACACCAAAACCACCAGTATCGATCTGAGCAGCCTGCGTCCGAGC
AGCCAGTATAAAGATCTGGGCGAATATTATGCAGAACTGAATCCGCTGCTGTATCATATTAGCTTTCAGCGTA
TTGCCGAGAAAGAAATCATGGACGCAGTTGAAACCGGTAAACTGTACCTGTTCCAGATCTACAATAAAGATTT
TGCCAAAGGCCATCATGGCAAACCGAATCTGCATACCCTGTATTGGACCGGTCTGTTTAGCCCTGAAAATCTG
GCAAAAACCTCGATTAAACTGAATGGTCAGGCGGAACTGTTTTATCGTCCGAAAAGCCGTATGAAACGTATG
GCACATCGTCTGGGTGAAAAAATGCTGAACAAAAAACTGAAAGACCAGAAAACCCCGATCCCGGATACACTG
TATCAAGAACTGTATGATTATGTGAACCATCGTCTGAGCCATGATCTGAGTGATGAAGCACGTGCCCTGCTGC
CGAATGTTATTACCAAAGAAGTTAGCCACGAGATCATTAAAGATCGTCGTTTTACCAGCGACAAATTCTTTTTT
CATGTGCCGATTACCCTGAATTATCAGGCAGCAAATAGCCCGAGCAAATTTAACCAGCGTGTTAATGCATATC
TGAAAGAACATCCAGAAACGCCGATTATTGGTATTGATCGTGGTGAACGTAACCTGATTTATATCACCGTTATT
GATAGCACCGGCAAAATCCTGGAACAGCGTAGCCTGAATACCATTCAGCAGTTTGATTACCAGAAAAAACTG
GATAATCGCGAGAAAGAACGTGTTGCAGCACGTCAGGCATGGTCAGTTGTTGGTACAATTAAAGACCTGAAA
CAGGGTTATCTGAGCCAGGTTATTCATGAAATTGTGGATCTGATGATTCACTATCAGGCCGTTGTTGTGCTGG
AAAACCTGAATTTTGGCTTTAAAAGCAAACGTACCGGCATTGCAGAAAAAGCAGTTTATCAGCAGTTCGAGAA
AATGCTGATTGACAAACTGAATTGCCTGGTGCTGAAAGATTATCCGGCTGAAAAAGTTGGTGGTGTTCTGAAT
CCGTATCAGCTGACCGATCAGTTTACCAGCTTTGCAAAAATGGGCACCCAGAGCGGATTTCTGTTTTATGTTCC
GGCACCGTATACGAGCAAAATTGATCCGCTGACCGGTTTTGTTGATCCGTTTGTTTGGAAAACCATCAAAAAC
CATGAAAGCCGCAAACATTTTCTGGAAGGTTTCGATTTTCTGCATTACGACGTTAAAACGGGTGATTTCATCCT
GCACTTTAAAATGAATCGCAATCTGAGTTTTCAGCGTGGCCTGCCTGGTTTTATGCCTGCATGGGATATTGTGT
TTGAGAAAAACGAAACACAGTTCGATGCAAAAGGCACCCCGTTTATTGCAGGTAAACGTATTGTTCCGGTGAT
TGAAAATCATCGTTTCACCGGTCGTTATCGCGATCTGTATCCGGCAAATGAACTGATCGCACTGCTGGAAGAG
AAAGGTATTGTTTTTCGTGATGGCTCAAACATTCTGCCGAAACTGCTGGAAAATGATGATAGCCATGCAATTG
ATACCATGGTTGCACTGATTCGTAGCGTTCTGCAGATGCGTAATAGCAATGCAGCAACCGGTGAAGATTACAT
TAATAGTCCGGTTCGTGATCTGAATGGTGTTTGTTTTGATAGCCGTTTTCAGAATCCGGAATGGCCGATGGAT
GCAGATGCAAATGGTGCATATCATATTGCACTGAAAGGACAGCTGCTGCTGAACCACCTGAAAGAAAGCAAA
GATCTGAAACTGCAAAACGGCATTAGCAATCAGGATTGGCTGGCATATATCCAAGAACTGCGTAAC
SEQ ID NO.: 471
Human optimized DNA F870L Cas12a
atgACCCAGTTTGAAGGTTTCACCAATCTGTATCAGGTTAGCAAAACCCTGCGTTTTGAACTG
ATTCCGCAGGGTAAAACCCTGAAACATATTCAAGAACAGGGCTTCATCGAAGAGGATAAAGCACGTAACGAT
CACTACAAAGAACTGAAACCGATTATCGACCGCATCTATAAAACCTATGCAGATCAGTGTCTGCAGCTGGTTC
AGCTGGATTGGGAAAATCTGAGCGCAGCAATTGATAGTTATCGCAAAGAAAAAACCGAAGAAACCCGTAATG
CACTGATTGAAGAACAGGCAACCTATCGTAATGCCATCCATGATTATTTCATTGGTCGTACCGATAATCTGACC
GATGCAATTAACAAACGTCACGCCGAAATCTATAAAGGCCTGTTTAAAGCCGAACTGTTTAATGGCAAAGTTC
TGAAACAGCTGGGCACCGTTACCACCACCGAACATGAAAATGCACTGCTGCGTAGCTTTGATAAATTCACCAC
CTATTTCAGCGGCTTTTATGAGAATCGCAAAAACGTGTTTAGCGCAGAAGATATTAGCACCGCAATTCCGCAT
CGTATTGTGCAGGATAATTTCCCGAAATTCAAAGAGAACTGCCACATTTTTACCCGTCTGATTACCGCAGTTCC
GAGCCTGCGTGAACATTTTGAAAACGTTAAAAAAGCCATCGGCATCTTTGTTAGCACCAGCATTGAAGAAGTT
TTTAGCTTCCCGTTTTACAATCAGCTGCTGACCCAGACCCAGATTGATCTGTATAACCAACTGCTGGGTGGTAT
TAGCCGTGAAGCAGGCACCGAAAAAATCAAAGGTCTGAATGAAGTGCTGAATCTGGCCATTCAGAAAAATGA
TGAAACCGCACATATTATTGCAAGCCTGCCGCATCGTTTTATTCCGCTGTTCAAACAAATTCTGAGCGATCGTA
ATACCCTGAGCTTTATTCTGGAAGAATTCAAATCCGATGAAGAGGTGATTCAGAGCTTTTGCAAATACAAAAC
GCTGCTGCGCAATGAAAATGTTCTGGAAACTGCCGAAGCACTGTTTAACGAACTGAATAGCATTGATCTGACC
CACATCTTTATCAGCCACAAAAAACTGGAAACCATTTCAAGCGCACTGTGTGATCATTGGGATACCCTGCGTA
ATGCCCTGTATGAACGTCGTATTAGCGAACTGACCGGTAAAATTACCAAAAGCGCGAAAGAAAAAGTTCAGC
GCAGTCTGAAACATGAGGATATTAATCTGCAAGAGATTATTAGCGCAGCCGGTAAAGAACTGTCAGAAGCAT
TTAAACAGAAAACCAGCGAAATTCTGTCACATGCACATGCAGCACTGGATCAGCCGCTGCCGACCACCCTGAA
AAAACAAGAAGAAAAAGAAATCCTGAAAAGCCAGCTGGATAGCCTGCTGGGTCTGTATCATCTGCTGGACTG
GTTTGCAGTTGATGAAAGCAATGAAGTTGATCCGGAATTTAGCGCACGTCTGACCGGCATTAAACTGGAAAT
GGAACCGAGCCTGAGCTTTTATAACAAAGCCCGTAATTATGCCACCAAAAAACCGTATAGCGTCGAAAAATTC
AAACTGAACTTTCAGATGCCGACCCTGGCAAGCGGTTGGGATGTTAATAAAGAAAAAAACAACGGTGCCATC
CTGTTCGTGAAAAATGGCCTGTATTATCTGGGTATTATGCCGAAACAGAAAGGTCGTTATAAAGCGCTGAGCT
TTGAACCGACGGAAAAAACCAGTGAAGGTTTTGATAAAATGTACTACGACTATTTTCCGGATGCAGCCAAAAT
GATTCCGAAATGTAGCACCCAGCTGAAAGCAGTTACCGCACATTTTCAGACCCATACCACCCCGATTCTGCTGA
GCAATAACTTTATTGAACCGCTGGAAATCACCAAAGAGATCTACGATCTGAATAACCCGGAAAAAGAGCCGA
AAAAATTCCAGACCGCATATGCAAAAAAAACCGGTGATCAGAAAGGTTATCGTGAAGCGCTGTGTAAATGGA
TTGATTTCACCCGTGATTTTCTGAGCAAATACACCAAAACCACCAGTATCGATCTGAGCAGCCTGCGTCCGAGC
AGCCAGTATAAAGATCTGGGCGAATATTATGCAGAACTGAATCCGCTGCTGTATCATATTAGCTTTCAGCGTA
TTGCCGAGAAAGAAATCATGGACGCAGTTGAAACCGGTAAACTGTACCTGTTCCAGATCTACAATAAAGATTT
TGCCAAAGGCCATCATGGCAAACCGAATCTGCATACCCTGTATTGGACCGGTCTGTTTAGCCCTGAAAATCTG
GCAAAAACCTCGATTAAACTGAATGGTCAGGCGGAACTGTTTTATCGTCCGAAAAGCCGTATGAAACGTATG
GCACATCGTCTGGGTGAAAAAATGCTGAACAAAAAACTGAAAGACCAGAAAACCCCGATCCCGGATACACTG
TATCAAGAACTGTATGATTATGTGAACCATCGTCTGAGCCATGATCTGAGTGATGAAGCACGTGCCCTGCTGC
CGAATGTTATTACCAAAGAAGTTAGCCACGAGATCATTAAAGATCGTCGTTTTACCAGCGACAAATTCCTGTTT
CATGTGCCGATTACCCTGAATTATCAGGCAGCAAATAGCCCGAGCAAATTTAACCAGCGTGTTAATGCATATC
TGAAAGAACATCCAGAAACGCCGATTATTGGTATTGATCGTGGTGAACGTAACCTGATTTATATCACCGTTATT
GATAGCACCGGCAAAATCCTGGAACAGCGTAGCCTGAATACCATTCAGCAGTTTGATTACCAGAAAAAACTG
GATAATCGCGAGAAAGAACGTGTTGCAGCACGTCAGGCATGGTCAGTTGTTGGTACAATTAAAGACCTGAAA
CAGGGTTATCTGAGCCAGGTTATTCATGAAATTGTGGATCTGATGATTCACTATCAGGCCGTTGTTGTGCTGG
AAAACCTGAATTTTGGCTTTAAAAGCAAACGTACCGGCATTGCAGAAAAAGCAGTTTATCAGCAGTTCGAGAA
AATGCTGATTGACAAACTGAATTGCCTGGTGCTGAAAGATTATCCGGCTGAAAAAGTTGGTGGTGTTCTGAAT
CCGTATCAGCTGACCGATCAGTTTACCAGCTTTGCAAAAATGGGCACCCAGAGCGGATTTCTGTTTTATGTTCC
GGCACCGTATACGAGCAAAATTGATCCGCTGACCGGTTTTGTTGATCCGTTTGTTTGGAAAACCATCAAAAAC
CATGAAAGCCGCAAACATTTTCTGGAAGGTTTCGATTTTCTGCATTACGACGTTAAAACGGGTGATTTCATCCT
GCACTTTAAAATGAATCGCAATCTGAGTTTTCAGCGTGGCCTGCCTGGTTTTATGCCTGCATGGGATATTGTGT
TTGAGAAAAACGAAACACAGTTCGATGCAAAAGGCACCCCGTTTATTGCAGGTAAACGTATTGTTCCGGTGAT
TGAAAATCATCGTTTCACCGGTCGTTATCGCGATCTGTATCCGGCAAATGAACTGATCGCACTGCTGGAAGAG
AAAGGTATTGTTTTTCGTGATGGCTCAAACATTCTGCCGAAACTGCTGGAAAATGATGATAGCCATGCAATTG
ATACCATGGTTGCACTGATTCGTAGCGTTCTGCAGATGCGTAATAGCAATGCAGCAACCGGTGAAGATTACAT
TAATAGTCCGGTTCGTGATCTGAATGGTGTTTGTTTTGATAGCCGTTTTCAGAATCCGGAATGGCCGATGGAT
GCAGATGCAAATGGTGCATATCATATTGCACTGAAAGGACAGCTGCTGCTGAACCACCTGAAAGAAAGCAAA
GATCTGAAACTGCAAAACGGCATTAGCAATCAGGATTGGCTGGCATATATCCAAGAACTGCGTAAC
SEQ ID NO.: 472
M537R Cas12a AA
MTQFEGFTNLYQVSKTLRFELIPQGKTLKHIQEQGFIEEDKARNDHYKELKPIIDRIYKTYADQCL
QLVQLDWENLSAAIDSYRKEKTEETRNALIEEQATYRNAIHDYFIGRTDNLTDAINKRHAEIYKGLFKAELFNGKVLK
QLGTVTTTEHENALLRSFDKFTTYFSGFYENRKNVFSAEDISTAIPHRIVQDNFPKFKENCHIFTRLITAVPSLREHFEN
VKKAIGIFVSTSIEEVFSFPFYNQLLTQTQIDLYNQLLGGISREAGTEKIKGLNEVLNLAIQKNDETAHIIASLPHRFIPLF
KQILSDRNTLSFILEEFKSDEEVIQSFCKYKTLLRNENVLETAEALFNELNSIDLTHIFISHKKLETISSALCDHWDTLRNA
LYERRISELTGKITKSAKEKVQRSLKHEDINLQEIISAAGKELSEAFKQKTSEILSHAHAALDQPLPTTLKKQEEKEILKSQ
LDSLLGLYHLLDWFAVDESNEVDPEFSARLTGIKLEMEPSLSFYNKARNYATKKPYSVEKFKLNFQRPTLASGWDVN
KEKNNGAILFVKNGLYYLGIMPKQKGRYKALSFEPTEKTSEGFDKMYYDYFPDAAKMIPKCSTQLKAVTAHFQTHT
TPILLSNNFIEPLEITKEIYDLNNPEKEPKKFQTAYAKKTGDQKGYREALCKWIDFTRDFLSKYTKTTSIDLSSLRPSSQY
KDLGEYYAELNPLLYHISFQRIAEKEIMDAVETGKLYLFQIYNKDFAKGHHGKPNLHTLYWTGLFSPENLAKTSIKLN
GQAELFYRPKSRMKRMAHRLGEKMLNKKLKDQKTPIPDTLYQELYDYVNHRLSHDLSDEARALLPNVITKEVSHEII
KDRRFTSDKFFFHVPITLNYQAANSPSKFNQRVNAYLKEHPETPIIGIDRGERNLIYITVIDSTGKILEQRSLNTIQQFD
YQKKLDNREKERVAARQAWSVVGTIKDLKQGYLSQVIHEIVDLMIHYQAVVVLENLNFGFKSKRTGIAEKAVYQQF
EKMLIDKLNCLVLKDYPAEKVGGVLNPYQLTDQFTSFAKMGTQSGFLFYVPAPYTSKIDPLTGFVDPFVWKTIKNHE
SRKHFLEGFDFLHYDVKTGDFILHFKMNRNLSFQRGLPGFMPAWDIVFEKNETQFDAKGTPFIAGKRIVPVIENHR
FTGRYRDLYPANELIALLEEKGIVFRDGSNILPKLLENDDSHAIDTMVALIRSVLQMRNSNAATGEDYINSPVRDLNG
VCFDSRFQNPEWPMDADANGAYHIALKGQLLLNHLKESKDLKLQNGISNQDWLAYIQELRN
SEQ ID NO.: 473
F870L Cas12a AA
MTQFEGFTNLYQVSKTLRFELIPQGKTLKHIQEQGFIEEDKARNDHYKELKPIIDRIYKTYADQCL
QLVQLDWENLSAAIDSYRKEKTEETRNALIEEQATYRNAIHDYFIGRTDNLTDAINKRHAEIYKGLFKAELFNGKVLK
QLGTVTTTEHENALLRSFDKFTTYFSGFYENRKNVFSAEDISTAIPHRIVQDNFPKFKENCHIFTRLITAVPSLREHFEN
VKKAIGIFVSTSIEEVFSFPFYNQLLTQTQIDLYNQLLGGISREAGTEKIKGLNEVLNLAIQKNDETAHIIASLPHRFIPLF
KQILSDRNTLSFILEEFKSDEEVIQSFCKYKTLLRNENVLETAEALFNELNSIDLTHIFISHKKLETISSALCDHWDTLRNA
LYERRISELTGKITKSAKEKVQRSLKHEDINLQEIISAAGKELSEAFKQKTSEILSHAHAALDQPLPTTLKKQEEKEILKSQ
LDSLLGLYHLLDWFAVDESNEVDPEFSARLTGIKLEMEPSLSFYNKARNYATKKPYSVEKFKLNFQMPTLASGWDV
NKEKNNGAILFVKNGLYYLGIMPKQKGRYKALSFEPTEKTSEGFDKMYYDYFPDAAKMIPKCSTQLKAVTAHFQTH
TTPILLSNNFIEPLEITKEIYDLNNPEKEPKKFQTAYAKKTGDQKGYREALCKWIDFTRDFLSKYTKTTSIDLSSLRPSSQ
YKDLGEYYAELNPLLYHISFQRIAEKEIMDAVETGKLYLFQIYNKDFAKGHHGKPNLHTLYWTGLFSPENLAKTSIKLN
GQAELFYRPKSRMKRMAHRLGEKMLNKKLKDQKTPIPDTLYQELYDYVNHRLSHDLSDEARALLPNVITKEVSHEII
KDRRFTSDKFLFHVPITLNYQAANSPSKFNQRVNAYLKEHPETPIIGIDRGERNLIYITVIDSTGKILEQRSLNTIQQFD
YQKKLDNREKERVAARQAWSVVGTIKDLKQGYLSQVIHEIVDLMIHYQAVVVLENLNFGFKSKRTGIAEKAVYQQF
EKMLIDKLNCLVLKDYPAEKVGGVLNPYQLTDQFTSFAKMGTQSGFLFYVPAPYTSKIDPLTGFVDPFVWKTIKNHE
SRKHFLEGFDFLHYDVKTGDFILHFKMNRNLSFQRGLPGFMPAWDIVFEKNETQFDAKGTPFIAGKRIVPVIENHR
FTGRYRDLYPANELIALLEEKGIVFRDGSNILPKLLENDDSHAIDTMVALIRSVLQMRNSNAATGEDYINSPVRDLNG
VCFDSRFQNPEWPMDADANGAYHIALKGQLLLNHLKESKDLKLQNGISNQDWLAYIQELRN

### Example 6

### Rational Design of Fusion Cas12a Polypeptides

[0110] Fusion Cas12/a polypeptides having additional motifs enabling nuclear localization into eukaryotic cells (collectively, “NLS” or “NLS sequences”), and/or purification and label detection motifs (collectively, “affinity tags”) fall within the scope of the present invention. Exemplary nuclear localization signals (“NLS” or “NLS sequences”) are well known in the art and include those listed identified by polynucleotide and amino acid sequences depicted in Table 6.

TABLE 6
Exemplary NLS sequences

| SEQ ID | NLS | |
|---|---|---|
| NO.: | Name | Sequence (5′→3′ or N→C) |
| 474 | SV40 | CCGAAAAAAAAACGTAAAGTTGG |
| 475 | SV40 | PKKKRKV |
| 476 | OpT | AGCAGTGATGATGAAGCAACCGCAGATAGCCAGCATGCA |
| | | GCACCGCCTAAAAAGAAACGTAAAGTT |
| 477 | OpT | SSDDEATADSQHAAPPKKKRKV |
| 478 | aNLS | CCGCCTCCGAAACGTCCGCGTCTGGAT |
| 479 | aNLS | PPPKRPRLD |
| 480 | BIP1 | AAACGTCCGGCAGCAACCAAAAAAGCAGGTCAGGC |
| | | AAAAAAGAAAAAA |
| 481 | BIP1 | KRPAATKKAGQAKKKK |
| 482 | BIP2 | AAACGTACCGCAGATGGTAGCGAATTTGAAAGCCCGAAA |
| | | AAAAAGCGTAAGGTGGAA |
| 483 | BIP2 | KRTADGSEFESPKKKRKVE |

[0111] Exemplary purification and/or label detection motifs include affinity tags that are also well known in the art. Often, additional amino acid linkers inserted before or after the additional motifs can provide improvements in expression and/or stability of the expressed fusion Cas12/a polypeptide. Two examples of affinity tags are defined by polynucleotide and amino acid sequences depicted below in Table 7.

TABLE 7
Exemplary affinity tags

| SEQ ID | Affinity Tag | |
|---|---|---|
| NO.: | Name | Sequence (5′→3′ or N→C) |
| 484 | V5 | GGTAAACCGATTCCGAATCCGCTGCTGGGTC |
| | | TGGATAGCACC |
| 485 | V5 | GKPIPNPLLGLDST |
| 486 | HIS | CACCACCACCACCACCAC |
| 487 | HIS | HHHHHH |

[0112] Fusion Cas12a polypeptides that include a nuclear localization signal, linker amino acids and/or affinity tags can be readily constructed using chemical polypeptide methods or expressed from engineered polynucleotides encoding in-frame polypeptides created with recombinant DNA technology. Such technologies are well known and within the purview of one skilled in the art. Working examples of such polynucleotides and polypeptides are illustrated by SEQ ID NOs.: 5-30. Fusion Cas12a polypeptide variants that encode the open reading frames of SEQ ID NOs.: 59-245 having nuclear localization sequences and/or affinity tags and optionally amino acid linkers as needed fall within the scope of this disclosure. Exemplary Cas12a variants having nuclear localization signals are presented below.

[0113] Briefly, the method of site directed mutagenesis (SDM) was employed to create the expression constructs having As Cas12a coding sequences with different nuclear localization signals (NLS's). Site directed mutagenesis was performed by designing complimentary primers that encompass the desired nucleotide base change(s), along with flanking plasmid vector sequence, wherein each flanking region has a melting temperature (Tₘ) of at least 60° C. A polymerase chain reaction (PCR) run was then performed using standard cycling conditions for a total of 16 cycles. The restriction enzyme, DPN I, was added to digest away the starting plasmid vector material so only the new product containing the base changes remain. After DPN I treatment, a small amount of the PCR product was transformed into competent E. coli cells, recovered in SOC media and plated onto kanamycin resistance Luria Broth (LB) agar plates. Colonies were screened using the Sanger sequencing method to verify correct base changes in selected clones.

SEQ ID NO.: 488

E. coli optimized DNA WT Cas12a with NLS linkers
atgACCCAGTTTGAAGGTTTCACCAATCTGTATCAGGTTAGCAAAACCCT
GCGTTTTGAACTGATTCCGCAGGGTAAAACCCTGAAACATATTCAAGAAC
AGGGCTTCATCGAAGAGGATAAAGCACGTAACGATCACTACAAAGAACTG
AAACCGATTATCGACCGCATCTATAAAACCTATGCAGATCAGTGTCTGCA
GCTGGTTCAGCTGGATTGGGAAAATCTGAGCGCAGCAATTGATAGTTATC
GCAAAGAAAAAACCGAAGAAACCCGTAATGCACTGATTGAAGAACAGGCA
ACCTATCGTAATGCCATCCATGATTATTTCATTGGTCGTACCGATAATCT
GACCGATGCAATTAACAAACGTCACGCCGAAATCTATAAAGGCCTGTTTA
AAGCCGAACTGTTTAATGGCAAAGTTCTGAAACAGCTGGGCACCGTTACC
ACCACCGAACATGAAAATGCACTGCTGCGTAGCTTTGATAAATTCACCAC
CTATTTCAGCGGCTTTTATGAGAATCGCAAAAACGTGTTTAGCGCAGAAG
ATATTAGCACCGCAATTCCGCATCGTATTGTGCAGGATAATTTCCCGAAA
TTCAAAGAGAACTGCCACATTTTTACCCGTCTGATTACCGCAGTTCCGAG
CCTGCGTGAACATTTTGAAAACGTTAAAAAAGCCATCGGCATCTTTGTTA
GCACCAGCATTGAAGAAGTTTTTAGCTTCCCGTTTTACAATCAGCTGCTG
ACCCAGACCCAGATTGATCTGTATAACCAACTGCTGGGTGGTATTAGCCG
TGAAGCAGGCACCGAAAAAATCAAAGGTCTGAATGAAGTGCTGAATCTGG
CCATTCAGAAAAATGATGAAACCGCACATATTATTGCAAGCCTGCCGCAT
CGTTTTATTCCGCTGTTCAAACAAATTCTGAGCGATCGTAATACCCTGAG
CTTTATTCTGGAAGAATTCAAATCCGATGAAGAGGTGATTCAGAGCTTTT
GCAAATACAAAACGCTGCTGCGCAATGAAAATGTTCTGGAAACTGCCGAA
GCACTGTTTAACGAACTGAATAGCATTGATCTGACCCACATCTTTATCAG
CCACAAAAAACTGGAAACCATTTCAAGCGCACTGTGTGATCATTGGGATA
CCCTGCGTAATGCCCTGTATGAACGTCGTATTAGCGAACTGACCGGTAAA
ATTACCAAAAGCGCGAAAGAAAAAGTTCAGCGCAGTCTGAAACATGAGGA
TATTAATCTGCAAGAGATTATTAGCGCAGCCGGTAAAGAACTGTCAGAAG
CATTTAAACAGAAAACCAGCGAAATTCTGTCACATGCACATGCAGCACTG
GATCAGCCGCTGCCGACCACCCTGAAAAAACAAGAAGAAAAAGAAATCCT
GAAAAGCCAGCTGGATAGCCTGCTGGGTCTGTATCATCTGCTGGACTGGT
TTGCAGTTGATGAAAGCAATGAAGTTGATCCGGAATTTAGCGCACGTCTG
ACCGGCATTAAACTGGAAATGGAACCGAGCCTGAGCTTTTATAACAAAGC
CCGTAATTATGCCACCAAAAAACCGTATAGCGTCGAAAAATTCAAACTGA
ACTTTCAGATGCCGACCCTGGCAAGCGGTTGGGATGTTAATAAAGAAAAA
AACAACGGTGCCATCCTGTTCGTGAAAAATGGCCTGTATTATCTGGGTAT
TATGCCGAAACAGAAAGGTCGTTATAAAGCGCTGAGCTTTGAACCGACGG
AAAAAACCAGTGAAGGTTTTGATAAAATGTACTACGACTATTTTCCGGAT
GCAGCCAAAATGATTCCGAAATGTAGCACCCAGCTGAAAGCAGTTACCGC
ACATTTTCAGACCCATACCACCCCGATTCTGCTGAGCAATAACTTTATTG
AACCGCTGGAAATCACCAAAGAGATCTACGATCTGAATAACCCGGAAAAA
GAGCCGAAAAAATTCCAGACCGCATATGCAAAAAAAACCGGTGATCAGAA
AGGTTATCGTGAAGCGCTGTGTAAATGGATTGATTTCACCCGTGATTTTC
TGAGCAAATACACCAAAACCACCAGTATCGATCTGAGCAGCCTGCGTCCG
AGCAGCCAGTATAAAGATCTGGGCGAATATTATGCAGAACTGAATCCGCT
GCTGTATCATATTAGCTTTCAGCGTATTGCCGAGAAAGAAATCATGGACG
CAGTTGAAACCGGTAAACTGTACCTGTTCCAGATCTACAATAAAGATTTT
GCCAAAGGCCATCATGGCAAACCGAATCTGCATACCCTGTATTGGACCGG
TCTGTTTAGCCCTGAAAATCTGGCAAAAACCTCGATTAAACTGAATGGTC
AGGCGGAACTGTTTTATCGTCCGAAAAGCCGTATGAAACGTATGGCACAT
CGTCTGGGTGAAAAAATGCTGAACAAAAAACTGAAAGACCAGAAAACCCC
GATCCCGGATACACTGTATCAAGAACTGTATGATTATGTGAACCATCGTC
TGAGCCATGATCTGAGTGATGAAGCACGTGCCCTGCTGCCGAATGTTATT
ACCAAAGAAGTTAGCCACGAGATCATTAAAGATCGTCGTTTTACCAGCGA
CAAATTCTTTTTTCATGTGCCGATTACCCTGAATTATCAGGCAGCAAATA
GCCCGAGCAAATTTAACCAGCGTGTTAATGCATATCTGAAAGAACATCCA
GAAACGCCGATTATTGGTATTGATCGTGGTGAACGTAACCTGATTTATAT
CACCGTTATTGATAGCACCGGCAAAATCCTGGAACAGCGTAGCCTGAATA
CCATTCAGCAGTTTGATTACCAGAAAAAACTGGATAATCGCGAGAAAGAA
CGTGTTGCAGCACGTCAGGCATGGTCAGTTGTTGGTACAATTAAAGACCT
GAAACAGGGTTATCTGAGCCAGGTTATTCATGAAATTGTGGATCTGATGA
TTCACTATCAGGCCGTTGTTGTGCTGGAAAACCTGAATTTTGGCTTTAAA
AGCAAACGTACCGGCATTGCAGAAAAAGCAGTTTATCAGCAGTTCGAGAA
AATGCTGATTGACAAACTGAATTGCCTGGTGCTGAAAGATTATCCGGCTG
AAAAAGTTGGTGGTGTTCTGAATCCGTATCAGCTGACCGATCAGTTTACC
AGCTTTGCAAAAATGGGCACCCAGAGCGGATTTCTGTTTTATGTTCCGGC
ACCGTATACGAGCAAAATTGATCCGCTGACCGGTTTTGTTGATCCGTTTG
TTTGGAAAACCATCAAAAACCATGAAAGCCGCAAACATTTTCTGGAAGGT
TTCGATTTTCTGCATTACGACGTTAAAACGGGTGATTTCATCCTGCACTT
TAAAATGAATCGCAATCTGAGTTTTCAGCGTGGCCTGCCTGGTTTTATGC
CTGCATGGGATATTGTGTTTGAGAAAAACGAAACACAGTTCGATGCAAAA
GGCACCCCGTTTATTGCAGGTAAACGTATTGTTCCGGTGATTGAAAATCA
TCGTTTCACCGGTCGTTATCGCGATCTGTATCCGGCAAATGAACTGATCG
CACTGCTGGAAGAGAAAGGTATTGTTTTTCGTGATGGCTCAAACATTCTG
CCGAAACTGCTGGAAAATGATGATAGCCATGCAATTGATACCATGGTTGC
ACTGATTCGTAGCGTTCTGCAGATGCGTAATAGCAATGCAGCAACCGGTG
AAGATTACATTAATAGTCCGGTTCGTGATCTGAATGGTGTTTGTTTTGAT
AGCCGTTTTCAGAATCCGGAATGGCCGATGGATGCAGATGCAAATGGTGC
ATATCATATTGCACTGAAAGGACAGCTGCTGCTGAACCACCTGAAAGAAA
GCAAAGATCTGAAACTGCAAAACGGCATTAGCAATCAGGATTGGCTGGCA
TATATCCAAGAACTGCGTAACGGTCGTAGCAGTGATGATGAAGCAACCGC
AGATAGCCAGCATGCAGCACCGCCTAAAAAGAAACGTAAAGTTGGTGGTA
GCGGTGGTTCAGGTGGTAGTGGCGGTAGTGGTGGCTCAGGGGGTTCTGGT
GGCTCTGGTGGTAGCctcgagcaccaccaccaccaccac

[0114] The underlined sequences refer to nucleotides encoding amino acid linker sequences. The double-underlined sequences refer to nucleotides encoding nuclear localization sequences (NLS linker). The italicized sequences refer to nucleotides encoding amino acid affinity tag sequences ((HIS)₆).

SEQ ID NO. 489

E. coli optimized DNA M537R F870L Cas12a
with NLS linkers
atgACCCAGTTTGAAGGTTTCACCAATCTGTATCAGGTTAGCAAAACCCT
GCGTTTTGAACTGATTCCGCAGGGTAAAACCCTGAAACATATTCAAGAAC
AGGGCTTCATCGAAGAGGATAAAGCACGTAACGATCACTACAAAGAACTG
AAACCGATTATCGACCGCATCTATAAAACCTATGCAGATCAGTGTCTGCA
GCTGGTTCAGCTGGATTGGGAAAATCTGAGCGCAGCAATTGATAGTTATC
GCAAAGAAAAAACCGAAGAAACCCGTAATGCACTGATTGAAGAACAGGCA
ACCTATCGTAATGCCATCCATGATTATTTCATTGGTCGTACCGATAATCT
GACCGATGCAATTAACAAACGTCACGCCGAAATCTATAAAGGCCTGTTTA
AAGCCGAACTGTTTAATGGCAAAGTTCTGAAACAGCTGGGCACCGTTACC
ACCACCGAACATGAAAATGCACTGCTGCGTAGCTTTGATAAATTCACCAC
CTATTTCAGCGGCTTTTATGAGAATCGCAAAAACGTGTTTAGCGCAGAAG
ATATTAGCACCGCAATTCCGCATCGTATTGTGCAGGATAATTTCCCGAAA
TTCAAAGAGAACTGCCACATTTTTACCCGTCTGATTACCGCAGTTCCGAG
CCTGCGTGAACATTTTGAAAACGTTAAAAAAGCCATCGGCATCTTTGTTA
GCACCAGCATTGAAGAAGTTTTTAGCTTCCCGTTTTACAATCAGCTGCTG
ACCCAGACCCAGATTGATCTGTATAACCAACTGCTGGGTGGTATTAGCCG
TGAAGCAGGCACCGAAAAAATCAAAGGTCTGAATGAAGTGCTGAATCTGG
CCATTCAGAAAAATGATGAAACCGCACATATTATTGCAAGCCTGCCGCAT
CGTTTTATTCCGCTGTTCAAACAAATTCTGAGCGATCGTAATACCCTGAG
CTTTATTCTGGAAGAATTCAAATCCGATGAAGAGGTGATTCAGAGCTTTT
GCAAATACAAAACGCTGCTGCGCAATGAAAATGTTCTGGAAACTGCCGAA
GCACTGTTTAACGAACTGAATAGCATTGATCTGACCCACATCTTTATCAG
CCACAAAAAACTGGAAACCATTTCAAGCGCACTGTGTGATCATTGGGATA
CCCTGCGTAATGCCCTGTATGAACGTCGTATTAGCGAACTGACCGGTAAA
ATTACCAAAAGCGCGAAAGAAAAAGTTCAGCGCAGTCTGAAACATGAGGA
TATTAATCTGCAAGAGATTATTAGCGCAGCCGGTAAAGAACTGTCAGAAG
CATTTAAACAGAAAACCAGCGAAATTCTGTCACATGCACATGCAGCACTG
GATCAGCCGCTGCCGACCACCCTGAAAAAACAAGAAGAAAAAGAAATCCT
GAAAAGCCAGCTGGATAGCCTGCTGGGTCTGTATCATCTGCTGGACTGGT
TTGCAGTTGATGAAAGCAATGAAGTTGATCCGGAATTTAGCGCACGTCTG
ACCGGCATTAAACTGGAAATGGAACCGAGCCTGAGCTTTTATAACAAAGC
CCGTAATTATGCCACCAAAAAACCGTATAGCGTCGAAAAATTCAAACTGA
ACTTTCAGCGTCCGACCCTGGCAAGCGGTTGGGATGTTAATAAAGAAAAA
AACAACGGTGCCATCCTGTTCGTGAAAAATGGCCTGTATTATCTGGGTAT
TATGCCGAAACAGAAAGGTCGTTATAAAGCGCTGAGCTTTGAACCGACGG
AAAAAACCAGTGAAGGTTTTGATAAAATGTACTACGACTATTTTCCGGAT
GCAGCCAAAATGATTCCGAAATGTAGCACCCAGCTGAAAGCAGTTACCGC
ACATTTTCAGACCCATACCACCCCGATTCTGCTGAGCAATAACTTTATTG
AACCGCTGGAAATCACCAAAGAGATCTACGATCTGAATAACCCGGAAAAA
GAGCCGAAAAAATTCCAGACCGCATATGCAAAAAAAACCGGTGATCAGAA
AGGTTATCGTGAAGCGCTGTGTAAATGGATTGATTTCACCCGTGATTTTC
TGAGCAAATACACCAAAACCACCAGTATCGATCTGAGCAGCCTGCGTCCG
AGCAGCCAGTATAAAGATCTGGGCGAATATTATGCAGAACTGAATCCGCT
GCTGTATCATATTAGCTTTCAGCGTATTGCCGAGAAAGAAATCATGGACG
CAGTTGAAACCGGTAAACTGTACCTGTTCCAGATCTACAATAAAGATTTT
GCCAAAGGCCATCATGGCAAACCGAATCTGCATACCCTGTATTGGACCGG
TCTGTTTAGCCCTGAAAATCTGGCAAAAACCTCGATTAAACTGAATGGTC
AGGCGGAACTGTTTTATCGTCCGAAAAGCCGTATGAAACGTATGGCACAT
CGTCTGGGTGAAAAAATGCTGAACAAAAAACTGAAAGACCAGAAAACCCC
GATCCCGGATACACTGTATCAAGAACTGTATGATTATGTGAACCATCGTC
TGAGCCATGATCTGAGTGATGAAGCACGTGCCCTGCTGCCGAATGTTATT
ACCAAAGAAGTTAGCCACGAGATCATTAAAGATCGTCGTTTTACCAGCGA
CAAATTCCTGTTTCATGTGCCGATTACCCTGAATTATCAGGCAGCAAATA
GCCCGAGCAAATTTAACCAGCGTGTTAATGCATATCTGAAAGAACATCCA
GAAACGCCGATTATTGGTATTGATCGTGGTGAACGTAACCTGATTTATAT
CACCGTTATTGATAGCACCGGCAAAATCCTGGAACAGCGTAGCCTGAATA
CCATTCAGCAGTTTGATTACCAGAAAAAACTGGATAATCGCGAGAAAGAA
CGTGTTGCAGCACGTCAGGCATGGTCAGTTGTTGGTACAATTAAAGACCT
GAAACAGGGTTATCTGAGCCAGGTTATTCATGAAATTGTGGATCTGATGA
TTCACTATCAGGCCGTTGTTGTGCTGGAAAACCTGAATTTTGGCTTTAAA
AGCAAACGTACCGGCATTGCAGAAAAAGCAGTTTATCAGCAGTTCGAGAA
AATGCTGATTGACAAACTGAATTGCCTGGTGCTGAAAGATTATCCGGCTG
AAAAAGTTGGTGGTGTTCTGAATCCGTATCAGCTGACCGATCAGTTTACC
AGCTTTGCAAAAATGGGCACCCAGAGCGGATTTCTGTTTTATGTTCCGGC
ACCGTATACGAGCAAAATTGATCCGCTGACCGGTTTTGTTGATCCGTTTG
TTTGGAAAACCATCAAAAACCATGAAAGCCGCAAACATTTTCTGGAAGGT
TTCGATTTTCTGCATTACGACGTTAAAACGGGTGATTTCATCCTGCACTT
TAAAATGAATCGCAATCTGAGTTTTCAGCGTGGCCTGCCTGGTTTTATGC
CTGCATGGGATATTGTGTTTGAGAAAAACGAAACACAGTTCGATGCAAAA
GGCACCCCGTTTATTGCAGGTAAACGTATTGTTCCGGTGATTGAAAATCA
TCGTTTCACCGGTCGTTATCGCGATCTGTATCCGGCAAATGAACTGATCG
CACTGCTGGAAGAGAAAGGTATTGTTTTTCGTGATGGCTCAAACATTCTG
CCGAAACTGCTGGAAAATGATGATAGCCATGCAATTGATACCATGGTTGC
ACTGATTCGTAGCGTTCTGCAGATGCGTAATAGCAATGCAGCAACCGGTG
AAGATTACATTAATAGTCCGGTTCGTGATCTGAATGGTGTTTGTTTTGAT
AGCCGTTTTCAGAATCCGGAATGGCCGATGGATGCAGATGCAAATGGTGC
ATATCATATTGCACTGAAAGGACAGCTGCTGCTGAACCACCTGAAAGAAA
GCAAAGATCTGAAACTGCAAAACGGCATTAGCAATCAGGATTGGCTGGCA
TATATCCAAGAACTGCGTAACGGTCGTAGCAGTGATGATGAAGCAACCGC
AGATAGCCAGCATGCAGCACCGCCTAAAAAGAAACGTAAAGTTGGTGGTA
GCGGTGGTTCAGGTGGTAGTGGCGGTAGTGGTGGCTCAGGGGGTTCTGGT
GGCTCTGGTGGTAGCctcgagcaccaccaccaccaccac

[0115] The bolded and underlined sequences refer to mutant codons introduced into the Cas12a open reading frame. The underlined sequences refer to nucleotides encoding amino acid linker sequences. The double-underlined sequences refer to nucleotides encoding nuclear localization sequences (NLS linker). The italicized sequences refer to nucleotides encoding amino acid affinity tag sequences ((HIS)₆).

SEQ ID NO.: 490

Human optimized DNA WT Cas12a with NLS linkers
atgACCCAGTTTGAAGGTTTCACCAATCTGTATCAGGTTAGCAAAACCCT
GCGTTTTGAACTGATTCCGCAGGGTAAAACCCTGAAACATATTCAAGAAC
AGGGCTTCATCGAAGAGGATAAAGCACGTAACGATCACTACAAAGAACTG
AAACCGATTATCGACCGCATCTATAAAACCTATGCAGATCAGTGTCTGCA
GCTGGTTCAGCTGGATTGGGAAAATCTGAGCGCAGCAATTGATAGTTATC
GCAAAGAAAAAACCGAAGAAACCCGTAATGCACTGATTGAAGAACAGGCA
ACCTATCGTAATGCCATCCATGATTATTTCATTGGTCGTACCGATAATCT
GACCGATGCAATTAACAAACGTCACGCCGAAATCTATAAAGGCCTGTTTA
AAGCCGAACTGTTTAATGGCAAAGTTCTGAAACAGCTGGGCACCGTTACC
ACCACCGAACATGAAAATGCACTGCTGCGTAGCTTTGATAAATTCACCAC
CTATTTCAGCGGCTTTTATGAGAATCGCAAAAACGTGTTTAGCGCAGAAG
ATATTAGCACCGCAATTCCGCATCGTATTGTGCAGGATAATTTCCCGAAA
TTCAAAGAGAACTGCCACATTTTTACCCGTCTGATTACCGCAGTTCCGAG
CCTGCGTGAACATTTTGAAAACGTTAAAAAAGCCATCGGCATCTTTGTTA
GCACCAGCATTGAAGAAGTTTTTAGCTTCCCGTTTTACAATCAGCTGCTG
ACCCAGACCCAGATTGATCTGTATAACCAACTGCTGGGTGGTATTAGCCG
TGAAGCAGGCACCGAAAAAATCAAAGGTCTGAATGAAGTGCTGAATCTGG
CCATTCAGAAAAATGATGAAACCGCACATATTATTGCAAGCCTGCCGCAT
CGTTTTATTCCGCTGTTCAAACAAATTCTGAGCGATCGTAATACCCTGAG
CTTTATTCTGGAAGAATTCAAATCCGATGAAGAGGTGATTCAGAGCTTTT
GCAAATACAAAACGCTGCTGCGCAATGAAAATGTTCTGGAAACTGCCGAA
GCACTGTTTAACGAACTGAATAGCATTGATCTGACCCACATCTTTATCAG
CCACAAAAAACTGGAAACCATTTCAAGCGCACTGTGTGATCATTGGGATA
CCCTGCGTAATGCCCTGTATGAACGTCGTATTAGCGAACTGACCGGTAAA
ATTACCAAAAGCGCGAAAGAAAAAGTTCAGCGCAGTCTGAAACATGAGGA
TATTAATCTGCAAGAGATTATTAGCGCAGCCGGTAAAGAACTGTCAGAAG
CATTTAAACAGAAAACCAGCGAAATTCTGTCACATGCACATGCAGCACTG
GATCAGCCGCTGCCGACCACCCTGAAAAAACAAGAAGAAAAAGAAATCCT
GAAAAGCCAGCTGGATAGCCTGCTGGGTCTGTATCATCTGCTGGACTGGT
TTGCAGTTGATGAAAGCAATGAAGTTGATCCGGAATTTAGCGCACGTCTG
ACCGGCATTAAACTGGAAATGGAACCGAGCCTGAGCTTTTATAACAAAGC
CCGTAATTATGCCACCAAAAAACCGTATAGCGTCGAAAAATTCAAACTGA
ACTTTCAGATGCCGACCCTGGCAAGCGGTTGGGATGTTAATAAAGAAAAA
AACAACGGTGCCATCCTGTTCGTGAAAAATGGCCTGTATTATCTGGGTAT
TATGCCGAAACAGAAAGGTCGTTATAAAGCGCTGAGCTTTGAACCGACGG
AAAAAACCAGTGAAGGTTTTGATAAAATGTACTACGACTATTTTCCGGAT
GCAGCCAAAATGATTCCGAAATGTAGCACCCAGCTGAAAGCAGTTACCGC
ACATTTTCAGACCCATACCACCCCGATTCTGCTGAGCAATAACTTTATTG
AACCGCTGGAAATCACCAAAGAGATCTACGATCTGAATAACCCGGAAAAA
GAGCCGAAAAAATTCCAGACCGCATATGCAAAAAAAACCGGTGATCAGAA
AGGTTATCGTGAAGCGCTGTGTAAATGGATTGATTTCACCCGTGATTTTC
TGAGCAAATACACCAAAACCACCAGTATCGATCTGAGCAGCCTGCGTCCG
AGCAGCCAGTATAAAGATCTGGGCGAATATTATGCAGAACTGAATCCGCT
GCTGTATCATATTAGCTTTCAGCGTATTGCCGAGAAAGAAATCATGGACG
CAGTTGAAACCGGTAAACTGTACCTGTTCCAGATCTACAATAAAGATTTT
GCCAAAGGCCATCATGGCAAACCGAATCTGCATACCCTGTATTGGACCGG
TCTGTTTAGCCCTGAAAATCTGGCAAAAACCTCGATTAAACTGAATGGTC
AGGCGGAACTGTTTTATCGTCCGAAAAGCCGTATGAAACGTATGGCACAT
CGTCTGGGTGAAAAAATGCTGAACAAAAAACTGAAAGACCAGAAAACCCC
GATCCCGGATACACTGTATCAAGAACTGTATGATTATGTGAACCATCGTC
TGAGCCATGATCTGAGTGATGAAGCACGTGCCCTGCTGCCGAATGTTATT
ACCAAAGAAGTTAGCCACGAGATCATTAAAGATCGTCGTTTTACCAGCGA
CAAATTCTTTTTTCATGTGCCGATTACCCTGAATTATCAGGCAGCAAATA
GCCCGAGCAAATTTAACCAGCGTGTTAATGCATATCTGAAAGAACATCCA
GAAACGCCGATTATTGGTATTGATCGTGGTGAACGTAACCTGATTTATAT
CACCGTTATTGATAGCACCGGCAAAATCCTGGAACAGCGTAGCCTGAATA
CCATTCAGCAGTTTGATTACCAGAAAAAACTGGATAATCGCGAGAAAGAA
CGTGTTGCAGCACGTCAGGCATGGTCAGTTGTTGGTACAATTAAAGACCT
GAAACAGGGTTATCTGAGCCAGGTTATTCATGAAATTGTGGATCTGATGA
TTCACTATCAGGCCGTTGTTGTGCTGGAAAACCTGAATTTTGGCTTTAAA
AGCAAACGTACCGGCATTGCAGAAAAAGCAGTTTATCAGCAGTTCGAGAA
AATGCTGATTGACAAACTGAATTGCCTGGTGCTGAAAGATTATCCGGCTG
AAAAAGTTGGTGGTGTTCTGAATCCGTATCAGCTGACCGATCAGTTTACC
AGCTTTGCAAAAATGGGCACCCAGAGCGGATTTCTGTTTTATGTTCCGGC
ACCGTATACGAGCAAAATTGATCCGCTGACCGGTTTTGTTGATCCGTTTG
TTTGGAAAACCATCAAAAACCATGAAAGCCGCAAACATTTTCTGGAAGGT
TTCGATTTTCTGCATTACGACGTTAAAACGGGTGATTTCATCCTGCACTT
TAAAATGAATCGCAATCTGAGTTTTCAGCGTGGCCTGCCTGGTTTTATGC
CTGCATGGGATATTGTGTTTGAGAAAAACGAAACACAGTTCGATGCAAAA
GGCACCCCGTTTATTGCAGGTAAACGTATTGTTCCGGTGATTGAAAATCA
TCGTTTCACCGGTCGTTATCGCGATCTGTATCCGGCAAATGAACTGATCG
CACTGCTGGAAGAGAAAGGTATTGTTTTTCGTGATGGCTCAAACATTCTG
CCGAAACTGCTGGAAAATGATGATAGCCATGCAATTGATACCATGGTTGC
ACTGATTCGTAGCGTTCTGCAGATGCGTAATAGCAATGCAGCAACCGGTG
AAGATTACATTAATAGTCCGGTTCGTGATCTGAATGGTGTTTGTTTTGAT
AGCCGTTTTCAGAATCCGGAATGGCCGATGGATGCAGATGCAAATGGTGC
ATATCATATTGCACTGAAAGGACAGCTGCTGCTGAACCACCTGAAAGAAA
GCAAAGATCTGAAACTGCAAAACGGCATTAGCAATCAGGATTGGCTGGCA
TATATCCAAGAACTGCGTAACGGTCGTAGCAGTGATGATGAAGCAACCGC
AGATAGCCAGCATGCAGCACCGCCTAAAAAGAAACGTAAAGTTGGTGGTA
GCGGTGGTTCAGGTGGTAGTGGCGGTAGTGGTGGCTCAGGGGGTTCTGGT
GGCTCTGGTGGTAGCctcgagcaccaccaccaccaccac

[0116] The underlined sequences refer to nucleotides encoding amino acid linker sequences. The double-underlined sequences refer to nucleotides encoding nuclear localization sequences (NLS linker). The italicized sequences refer to nucleotides encoding amino acid affinity tag sequences ((HIS)₆).

SEQ ID NO.: 491

Human optimized DNA M537R F870L Cas12a with
NLS linkers
atgACCCAGTTTGAAGGTTTCACCAATCTGTATCAGGTTAGCAAAACCCT
GCGTTTTGAACTGATTCCGCAGGGTAAAACCCTGAAACATATTCAAGAAC
AGGGCTTCATCGAAGAGGATAAAGCACGTAACGATCACTACAAAGAACTG
AAACCGATTATCGACCGCATCTATAAAACCTATGCAGATCAGTGTCTGCA
GCTGGTTCAGCTGGATTGGGAAAATCTGAGCGCAGCAATTGATAGTTATC
GCAAAGAAAAAACCGAAGAAACCCGTAATGCACTGATTGAAGAACAGGCA
ACCTATCGTAATGCCATCCATGATTATTTCATTGGTCGTACCGATAATCT
GACCGATGCAATTAACAAACGTCACGCCGAAATCTATAAAGGCCTGTTTA
AAGCCGAACTGTTTAATGGCAAAGTTCTGAAACAGCTGGGCACCGTTACC
ACCACCGAACATGAAAATGCACTGCTGCGTAGCTTTGATAAATTCACCAC
CTATTTCAGCGGCTTTTATGAGAATCGCAAAAACGTGTTTAGCGCAGAAG
ATATTAGCACCGCAATTCCGCATCGTATTGTGCAGGATAATTTCCCGAAA
TTCAAAGAGAACTGCCACATTTTTACCCGTCTGATTACCGCAGTTCCGAG
CCTGCGTGAACATTTTGAAAACGTTAAAAAAGCCATCGGCATCTTTGTTA
GCACCAGCATTGAAGAAGTTTTTAGCTTCCCGTTTTACAATCAGCTGCTG
ACCCAGACCCAGATTGATCTGTATAACCAACTGCTGGGTGGTATTAGCCG
TGAAGCAGGCACCGAAAAAATCAAAGGTCTGAATGAAGTGCTGAATCTGG
CCATTCAGAAAAATGATGAAACCGCACATATTATTGCAAGCCTGCCGCAT
CGTTTTATTCCGCTGTTCAAACAAATTCTGAGCGATCGTAATACCCTGAG
CTTTATTCTGGAAGAATTCAAATCCGATGAAGAGGTGATTCAGAGCTTTT
GCAAATACAAAACGCTGCTGCGCAATGAAAATGTTCTGGAAACTGCCGAA
GCACTGTTTAACGAACTGAATAGCATTGATCTGACCCACATCTTTATCAG
CCACAAAAAACTGGAAACCATTTCAAGCGCACTGTGTGATCATTGGGATA
CCCTGCGTAATGCCCTGTATGAACGTCGTATTAGCGAACTGACCGGTAAA
ATTACCAAAAGCGCGAAAGAAAAAGTTCAGCGCAGTCTGAAACATGAGGA
TATTAATCTGCAAGAGATTATTAGCGCAGCCGGTAAAGAACTGTCAGAAG
CATTTAAACAGAAAACCAGCGAAATTCTGTCACATGCACATGCAGCACTG
GATCAGCCGCTGCCGACCACCCTGAAAAAACAAGAAGAAAAAGAAATCCT
GAAAAGCCAGCTGGATAGCCTGCTGGGTCTGTATCATCTGCTGGACTGGT
TTGCAGTTGATGAAAGCAATGAAGTTGATCCGGAATTTAGCGCACGTCTG
ACCGGCATTAAACTGGAAATGGAACCGAGCCTGAGCTTTTATAACAAAGC
CCGTAATTATGCCACCAAAAAACCGTATAGCGTCGAAAAATTCAAACTGA
ACTTTCAGCGTCCGACCCTGGCAAGCGGTTGGGATGTTAATAAAGAAAAA
AACAACGGTGCCATCCTGTTCGTGAAAAATGGCCTGTATTATCTGGGTAT
TATGCCGAAACAGAAAGGTCGTTATAAAGCGCTGAGCTTTGAACCGACGG
AAAAAACCAGTGAAGGTTTTGATAAAATGTACTACGACTATTTTCCGGAT
GCAGCCAAAATGATTCCGAAATGTAGCACCCAGCTGAAAGCAGTTACCGC
ACATTTTCAGACCCATACCACCCCGATTCTGCTGAGCAATAACTTTATTG
AACCGCTGGAAATCACCAAAGAGATCTACGATCTGAATAACCCGGAAAAA
GAGCCGAAAAAATTCCAGACCGCATATGCAAAAAAAACCGGTGATCAGAA
AGGTTATCGTGAAGCGCTGTGTAAATGGATTGATTTCACCCGTGATTTTC
TGAGCAAATACACCAAAACCACCAGTATCGATCTGAGCAGCCTGCGTCCG
AGCAGCCAGTATAAAGATCTGGGCGAATATTATGCAGAACTGAATCCGCT
GCTGTATCATATTAGCTTTCAGCGTATTGCCGAGAAAGAAATCATGGACG
CAGTTGAAACCGGTAAACTGTACCTGTTCCAGATCTACAATAAAGATTTT
GCCAAAGGCCATCATGGCAAACCGAATCTGCATACCCTGTATTGGACCGG
TCTGTTTAGCCCTGAAAATCTGGCAAAAACCTCGATTAAACTGAATGGTC
AGGCGGAACTGTTTTATCGTCCGAAAAGCCGTATGAAACGTATGGCACAT
CGTCTGGGTGAAAAAATGCTGAACAAAAAACTGAAAGACCAGAAAACCCC
GATCCCGGATACACTGTATCAAGAACTGTATGATTATGTGAACCATCGTC
TGAGCCATGATCTGAGTGATGAAGCACGTGCCCTGCTGCCGAATGTTATT
ACCAAAGAAGTTAGCCACGAGATCATTAAAGATCGTCGTTTTACCAGCGA
CAAATTCCTGTTTCATGTGCCGATTACCCTGAATTATCAGGCAGCAAATA
GCCCGAGCAAATTTAACCAGCGTGTTAATGCATATCTGAAAGAACATCCA
GAAACGCCGATTATTGGTATTGATCGTGGTGAACGTAACCTGATTTATAT
CACCGTTATTGATAGCACCGGCAAAATCCTGGAACAGCGTAGCCTGAATA
CCATTCAGCAGTTTGATTACCAGAAAAAACTGGATAATCGCGAGAAAGAA
CGTGTTGCAGCACGTCAGGCATGGTCAGTTGTTGGTACAATTAAAGACCT
GAAACAGGGTTATCTGAGCCAGGTTATTCATGAAATTGTGGATCTGATGA
TTCACTATCAGGCCGTTGTTGTGCTGGAAAACCTGAATTTTGGCTTTAAA
AGCAAACGTACCGGCATTGCAGAAAAAGCAGTTTATCAGCAGTTCGAGAA
AATGCTGATTGACAAACTGAATTGCCTGGTGCTGAAAGATTATCCGGCTG
AAAAAGTTGGTGGTGTTCTGAATCCGTATCAGCTGACCGATCAGTTTACC
AGCTTTGCAAAAATGGGCACCCAGAGCGGATTTCTGTTTTATGTTCCGGC
ACCGTATACGAGCAAAATTGATCCGCTGACCGGTTTTGTTGATCCGTTTG
TTTGGAAAACCATCAAAAACCATGAAAGCCGCAAACATTTTCTGGAAGGT
TTCGATTTTCTGCATTACGACGTTAAAACGGGTGATTTCATCCTGCACTT
TAAAATGAATCGCAATCTGAGTTTTCAGCGTGGCCTGCCTGGTTTTATGC
CTGCATGGGATATTGTGTTTGAGAAAAACGAAACACAGTTCGATGCAAAA
GGCACCCCGTTTATTGCAGGTAAACGTATTGTTCCGGTGATTGAAAATCA
TCGTTTCACCGGTCGTTATCGCGATCTGTATCCGGCAAATGAACTGATCG
CACTGCTGGAAGAGAAAGGTATTGTTTTTCGTGATGGCTCAAACATTCTG
CCGAAACTGCTGGAAAATGATGATAGCCATGCAATTGATACCATGGTTGC
ACTGATTCGTAGCGTTCTGCAGATGCGTAATAGCAATGCAGCAACCGGTG
AAGATTACATTAATAGTCCGGTTCGTGATCTGAATGGTGTTTGTTTTGAT
AGCCGTTTTCAGAATCCGGAATGGCCGATGGATGCAGATGCAAATGGTGC
ATATCATATTGCACTGAAAGGACAGCTGCTGCTGAACCACCTGAAAGAAA
GCAAAGATCTGAAACTGCAAAACGGCATTAGCAATCAGGATTGGCTGGCA
TATATCCAAGAACTGCGTAACGGTCGTAGCAGTGATGATGAAGCAACCGC
AGATAGCCAGCATGCAGCACCGCCTAAAAAGAAACGTAAAGTTGGTGGTA
GCGGTGGTTCAGGTGGTAGTGGCGGTAGTGGTGGCTCAGGGGGTTCTGGT
GGCTCTGGTGGTAGCctcgagcaccaccaccaccaccac

[0117] The bolded and underlined sequences refer to mutant codons introduced into the Cas12a open reading frame. The underlined sequences refer to nucleotides encoding amino acid linker sequences. The double-underlined sequences refer to nucleotides encoding nuclear localization sequences (NLS linker). The italicized sequences refer to nucleotides encoding amino acid affinity tag sequences ((HIS)₆).

SEQ ID NO.: 492

WT Cas12a AA with NLS linkers
MTQFEGFTNLYQVSKTLRFELIPQGKTLKHIQEQGFIEEDKARNDHYKEL
KPIIDRIYKTYADQCLQLVQLDWENLSAAIDSYRKEKTEETRNALIEEQA
TYRNAIHDYFIGRTDNLTDAINKRHAEIYKGLFKAELFNGKVLKQLGTVT
TTEHENALLRSFDKFTTYFSGFYENRKNVFSAEDISTAIPHRIVQDNFPK
FKENCHIFTRLITAVPSLREHFENVKKAIGIFVSTSIEEVFSFPFYNQLL
TQTQIDLYNQLLGGISREAGTEKIKGLNEVLNLAIQKNDETAHIIASLPH
RFIPLFKQILSDRNTLSFILEEFKSDEEVIQSFCKYKTLLRNENVLETAE
ALFNELNSIDLTHIFISHKKLETISSALCDHWDTLRNALYERRISELTGK
ITKSAKEKVQRSLKHEDINLQEIISAAGKELSEAFKQKTSEILSHAHAAL
DQPLPTTLKKQEEKEILKSQLDSLLGLYHLLDWFAVDESNEVDPEFSARL
TGIKLEMEPSLSFYNKARNYATKKPYSVEKFKLNFQMPTLASGWDVNKEK
NNGAILFVKNGLYYLGIMPKQKGRYKALSFEPTEKTSEGFDKMYYDYFPD
AAKMIPKCSTQLKAVTAHFQTHTTPILLSNNFIEPLEITKEIYDLNNPEK
EPKKFQTAYAKKTGDQKGYREALCKWIDFTRDFLSKYTKTTSIDLSSLRP
SSQYKDLGEYYAELNPLLYHISFQRIAEKEIMDAVETGKLYLFQIYNKDF
AKGHHGKPNLHTLYWTGLFSPENLAKTSIKLNGQAELFYRPKSRMKRMAH
RLGEKMLNKKLKDQKTPIPDTLYQELYDYVNHRLSHDLSDEARALLPNVI
TKEVSHEIIKDRRFTSDKFFFHVPITLNYQAANSPSKFNQRVNAYLKEHP
ETPIIGIDRGERNLIYITVIDSTGKILEQRSLNTIQQFDYQKKLDNREKE
RVAARQAWSVVGTIKDLKQGYLSQVIHEIVDLMIHYQAVVVLENLNFGFK
SKRTGIAEKAVYQQFEKMLIDKLNCLVLKDYPAEKVGGVLNPYQLTDQFT
SFAKMGTQSGFLFYVPAPYTSKIDPLTGFVDPFVWKTIKNHESRKHFLEG
FDFLHYDVKTGDFILHFKMNRNLSFQRGLPGFMPAWDIVFEKNETQFDAK
GTPFIAGKRIVPVIENHRFTGRYRDLYPANELIALLEEKGIVFRDGSNIL
PKLLENDDSHAIDTMVALIRSVLQMRNSNAATGEDYINSPVRDLNGVCFD
SRFQNPEWPMDADANGAYHIALKGQLLLNHLKESKDLKLQNGISNQDWLA
YIQELRNGRSSDDEATADSQHAAPPKKKRKVGGSGGSGGSGGSGGSGGSG
GSGGSLEHHHHHH

[0118] The underlined sequences refer to amino acid sequences encoding amino acid linker sequences. The double-underlined sequences refer to amino acid sequences encoding nuclear localization sequences (NLS linker). The italicized sequences refer to amino acid sequences encoding amino acid affinity tag sequences ((HIS)₆).

SEQ ID NO.: 493

M537R F870L Cas12a AA with NLS linkers
MTQFEGFTNLYQVSKTLRFELIPQGKTLKHIQEQGFIEEDKARNDHYKEL
KPIIDRIYKTYADQCLQLVQLDWENLSAAIDSYRKEKTEETRNALIEEQA
TYRNAIHDYFIGRTDNLTDAINKRHAEIYKGLFKAELFNGKVLKQLGTVT
TTEHENALLRSFDKFTTYFSGFYENRKNVFSAEDISTAIPHRIVQDNFPK
FKENCHIFTRLITAVPSLREHFENVKKAIGIFVSTSIEEVFSFPFYNQLL
TQTQIDLYNQLLGGISREAGTEKIKGLNEVLNLAIQKNDETAHIIASLPH
RFIPLFKQILSDRNTLSFILEEFKSDEEVIQSFCKYKTLLRNENVLETAE
ALFNELNSIDLTHIFISHKKLETISSALCDHWDTLRNALYERRISELTGK
ITKSAKEKVQRSLKHEDINLQEIISAAGKELSEAFKQKTSEILSHAHAAL
DQPLPTTLKKQEEKEILKSQLDSLLGLYHLLDWFAVDESNEVDPEFSARL
TGIKLEMEPSLSFYNKARNYATKKPYSVEKFKLNFQRPTLASGWDVNKEK
NNGAILFVKNGLYYLGIMPKQKGRYKALSFEPTEKTSEGFDKMYYDYFPD
AAKMIPKCSTQLKAVTAHFQTHTTPILLSNNFIEPLEITKEIYDLNNPEK
EPKKFQTAYAKKTGDQKGYREALCKWIDFTRDFLSKYTKTTSIDLSSLRP
SSQYKDLGEYYAELNPLLYHISFQRIAEKEIMDAVETGKLYLFQIYNKDF
AKGHHGKPNLHTLYWTGLFSPENLAKTSIKLNGQAELFYRPKSRMKRMAH
RLGEKMLNKKLKDQKTPIPDTLYQELYDYVNHRLSHDLSDEARALLPNVI
TKEVSHEIIKDRRFTSDKFLFHVPITLNYQAANSPSKFNQRVNAYLKEHP
ETPIIGIDRGERNLIYITVIDSTGKILEQRSLNTIQQFDYQKKLDNREKE
RVAARQAWSVVGTIKDLKQGYLSQVIHEIVDLMIHYQAVVVLENLNFGFK
SKRTGIAEKAVYQQFEKMLIDKLNCLVLKDYPAEKVGGVLNPYQLTDQFT
SFAKMGTQSGFLFYVPAPYTSKIDPLTGFVDPFVWKTIKNHESRKHFLEG
FDFLHYDVKTGDFILHFKMNRNLSFQRGLPGFMPAWDIVFEKNETQFDAK
GTPFIAGKRIVPVIENHRFTGRYRDLYPANELIALLEEKGIVFRDGSNIL
PKLLENDDSHAIDTMVALIRSVLQMRNSNAATGEDYINSPVRDLNGVCFD
SRFQNPEWPMDADANGAYHIALKGQLLLNHLKESKDLKLQNGISNQDWLA
YIQELRNGRSSDDEATADSQHAAPPKKKRKVGGSGGSGGSGGSGGSGGSG
GSGGSLEHHHHHH

[0119] The bolded and underlined sequences refer to mutant amino acids introduced into the Cas12a polypeptide variant. The underlined sequences refer to amino acid sequences encoding amino acid linker sequences. The double-underlined sequences refer to amino acid sequences encoding nuclear localization sequences (NLS linker). The italicized sequences refer to amino acid sequences encoding amino acid affinity tag sequences ((HIS)₆).

### REFERENCES

[0120] Chen, J. S., et al., Enhanced proofreading governs CRISPR-Cas9 targeting accuracy. Nature, 2017. 550(7676): p. 407-410.

[0121] Gao, L., et al., Engineered Cpf1 variants with altered PAM specificities increase genome targeting range. Nat Biotechnol. 2017; 35(8): 789-792.

[0122] Jinek M, et al. A programmable dual-RNA-guided DNA endonuclease in adaptive bacterial immunity. Science. 2012; 337:816-821. doi: 10.1126/science.1225829.

[0123] Kleinstiver, B. P., et al., High-fidelity CRISPR-Cas9 nucleases with no detectable genome-wide off-target effects. Nature, 2016. 529(7587): p. 490-5.

[0124] Slaymaker, I. M., et al., Rationally engineered Cas9 nucleases with improved specificity. Science, 2016. 351(6268): p. 84-8.

[0125] Sun, Y., et al., Factors influencing the nuclear targeting ability of nuclear localization signals. J Drug Target, 2016. 24(10): p. 927-933.

[0126] Wrenbeck E E, Klesmith J R, Stapleton J A, Adeniran A, Tyo K E, Whitehead T A. Plasmid-based one-pot saturation mutagenesis. Nat Methods. 2016; 13(11):928-930. doi:10.1038/nmeth.4029

[0127] Zetsche, B., et al., Cpf1 Is a Single RNA-Guided Endonuclease of a Class 2 CRISPR-Cas System. Cell. 2015; 163:759-771. doi: 10.1016/j.ce11.2015.09.038.

### INCORPORATION BY REFERENCE

[0128] All of the patents, patent applications, patent application publications, and other publications cited herein are hereby incorporated by reference as if set forth in their entirety.

### Preferred Embodiments

[0129] The present invention has been described in connection with what are presently considered to be the most practical and preferred embodiments. However, the invention has been presented by way of illustration and is not intended to be limited to the disclosed embodiments. Accordingly, one of skill in the art will realize that the invention is intended to encompass all modifications and alternative arrangements within the spirit and scope of the invention as set forth in the appended claims.

The application's sequence listing, which the Patent Office published only in electronic form, follows.

SEQUENCE LISTING (493 sequences)

SEQ ID NO: 1 - RNA, 41 nt, Artificial Sequence
  SYNTHETIC
uaauuucuacucuuguagauuaaugcccuguagucucucug

SEQ ID NO: 2 - RNA, 41 nt, Artificial Sequence
  SYNTHETIC
uaauuucuacucuuguagauuaauuaacagcuugcugguga

SEQ ID NO: 3 - DNA, 27 bp, Artificial Sequence
  SYNTHETIC
aagaatgttgtgataaaaggtgatgct

SEQ ID NO: 4 - DNA, 24 bp, Artificial Sequence
  SYNTHETIC
gaggcagaagtcccatggatgtgt

SEQ ID NO: 5 - DNA, 4155 bp, Artificial Sequence
  SYNTHETIC
atgggcagcagcagcagcggcctggtgccgcgcggcagccatatggctagcatgactggtggacagcaaatgggtcgggatccaggtaaaccgattccgaatccgctgctgggtctggatagcaccgcaccgaaaaaaaaacgtaaagttggtattcatggtgttccggcagcaacccagtttgaaggtttcaccaatctgtatcaggttagcaaaaccctgcgttttgaactgattccgcagggtaaaaccctgaaacatattcaagaacagggcttcatcgaagaggataaagcacgtaacgatcactacaaagaactgaaaccgattatcgaccgcatctataaaacctatgcagatcagtgtctgcagctggttcagctggattgggaaaatctgagcgcagcaattgatagttatcgcaaagaaaaaaccgaagaaacccgtaatgcactgattgaagaacaggcaacctatcgtaatgccatccatgattatttcattggtcgtaccgataatctgaccgatgcaattaacaaacgtcacgccgaaatctataaaggcctgtttaaagccgaactgtttaatggcaaagttctgaaacagctgggcaccgttaccaccaccgaacatgaaaatgcactgctgcgtagctttgataaattcaccacctatttcagcggcttttatgagaatcgcaaaaacgtgtttagcgcagaagatattagcaccgcaattccgcatcgtattgtgcaggataatttcccgaaattcaaagagaactgccacatttttacccgtctgattaccgcagttccgagcctgcgtgaacattttgaaaacgttaaaaaagccatcggcatctttgttagcaccagcattgaagaagtttttagcttcccgttttacaatcagctgctgacccagacccagattgatctgtataaccaactgctgggtggtattagccgtgaagcaggcaccgaaaaaatcaaaggtctgaatgaagtgctgaatctggccattcagaaaaatgatgaaaccgcacatattattgcaagcctgccgcatcgttttattccgctgttcaaacaaattctgagcgatcgtaataccctgagctttattctggaagaattcaaatccgatgaagaggtgattcagagcttttgcaaatacaaaacgctgctgcgcaatgaaaatgttctggaaactgccgaagcactgtttaacgaactgaatagcattgatctgacccacatctttatcagccacaaaaaactggaaaccatttcaagcgcactgtgtgatcattgggataccctgcgtaatgccctgtatgaacgtcgtattagcgaactgaccggtaaaattaccaaaagcgcgaaagaaaaagttcagcgcagtctgaaacatgaggatattaatctgcaagagattattagcgcagccggtaaagaactgtcagaagcatttaaacagaaaaccagcgaaattctgtcacatgcacatgcagcactggatcagccgctgccgaccaccctgaaaaaacaagaagaaaaagaaatcctgaaaagccagctggatagcctgctgggtctgtatcatctgctggactggtttgcagttgatgaaagcaatgaagttgatccggaatttagcgcacgtctgaccggcattaaactggaaatggaaccgagcctgagcttttataacaaagcccgtaattatgccaccaaaaaaccgtatagcgtcgaaaaattcaaactgaactttcagatgccgaccctggcaagcggttgggatgttaataaagaaaaaaacaacggtgccatcctgttcgtgaaaaatggcctgtattatctgggtattatgccgaaacagaaaggtcgttataaagcgctgagctttgaaccgacggaaaaaaccagtgaaggttttgataaaatgtactacgactattttccggatgcagccaaaatgattccgaaatgtagcacccagctgaaagcagttaccgcacattttcagacccataccaccccgattctgctgagcaataactttattgaaccgctggaaatcaccaaagagatctacgatctgaataacccggaaaaagagccgaaaaaattccagaccgcatatgcaaaaaaaaccggtgatcagaaaggttatcgtgaagcgctgtgtaaatggattgatttcacccgtgattttctgagcaaatacaccaaaaccaccagtatcgatctgagcagcctgcgtccgagcagccagtataaagatctgggcgaatattatgcagaactgaatccgctgctgtatcatattagctttcagcgtattgccgagaaagaaatcatggacgcagttgaaaccggtaaactgtacctgttccagatctacaataaagattttgccaaaggccatcatggcaaaccgaatctgcataccctgtattggaccggtctgtttagccctgaaaatctggcaaaaacctcgattaaactgaatggtcaggcggaactgttttatcgtccgaaaagccgtatgaaacgtatggcacatcgtctgggtgaaaaaatgctgaacaaaaaactgaaagaccagaaaaccccgatcccggatacactgtatcaagaactgtatgattatgtgaaccatcgtctgagccatgatctgagtgatgaagcacgtgccctgctgccgaatgttattaccaaagaagttagccacgagatcattaaagatcgtcgttttaccagcgacaaattcttttttcatgtgccgattaccctgaattatcaggcagcaaatagcccgagcaaatttaaccagcgtgttaatgcatatctgaaagaacatccagaaacgccgattattggtattgatcgtggtgaacgtaacctgatttatatcaccgttattgatagcaccggcaaaatcctggaacagcgtagcctgaataccattcagcagtttgattaccagaaaaaactggataatcgcgagaaagaacgtgttgcagcacgtcaggcatggtcagttgttggtacaattaaagacctgaaacagggttatctgagccaggttattcatgaaattgtggatctgatgattcactatcaggccgttgttgtgctggaaaacctgaattttggctttaaaagcaaacgtaccggcattgcagaaaaagcagtttatcagcagttcgagaaaatgctgattgacaaactgaattgcctggtgctgaaagattatccggctgaaaaagttggtggtgttctgaatccgtatcagctgaccgatcagtttaccagctttgcaaaaatgggcacccagagcggatttctgttttatgttccggcaccgtatacgagcaaaattgatccgctgaccggttttgttgatccgtttgtttggaaaaccatcaaaaaccatgaaagccgcaaacattttctggaaggtttcgattttctgcattacgacgttaaaacgggtgatttcatcctgcactttaaaatgaatcgcaatctgagttttcagcgtggcctgcctggttttatgcctgcatgggatattgtgtttgagaaaaacgaaacacagttcgatgcaaaaggcaccccgtttattgcaggtaaacgtattgttccggtgattgaaaatcatcgtttcaccggtcgttatcgcgatctgtatccggcaaatgaactgatcgcactgctggaagagaaaggtattgtttttcgtgatggctcaaacattctgccgaaactgctggaaaatgatgatagccatgcaattgataccatggttgcactgattcgtagcgttctgcagatgcgtaatagcaatgcagcaaccggtgaagattacattaatagtccggttcgtgatctgaatggtgtttgttttgatagccgttttcagaatccggaatggccgatggatgcagatgcaaatggtgcatatcatattgcactgaaaggacagctgctgctgaaccacctgaaagaaagcaaagatctgaaactgcaaaacggcattagcaatcaggattggctggcatatatccaagaactgcgtaaccctaaaaaaaaacgcaaagtgaagcttgcggccgcactcgagcaccaccaccaccaccactga

SEQ ID NO: 6 - DNA, 4113 bp, Artificial Sequence
  SYNTHETIC
atgggcagcagcagcagcggcctggtgccgcgcggcagccatatggctagcatgactggtggacagcaaatgggtcgggatccagcaccgaaaaaaaaacgtaaagttggtattcatggtgttccggcagcaacccagtttgaaggtttcaccaatctgtatcaggttagcaaaaccctgcgttttgaactgattccgcagggtaaaaccctgaaacatattcaagaacagggcttcatcgaagaggataaagcacgtaacgatcactacaaagaactgaaaccgattatcgaccgcatctataaaacctatgcagatcagtgtctgcagctggttcagctggattgggaaaatctgagcgcagcaattgatagttatcgcaaagaaaaaaccgaagaaacccgtaatgcactgattgaagaacaggcaacctatcgtaatgccatccatgattatttcattggtcgtaccgataatctgaccgatgcaattaacaaacgtcacgccgaaatctataaaggcctgtttaaagccgaactgtttaatggcaaagttctgaaacagctgggcaccgttaccaccaccgaacatgaaaatgcactgctgcgtagctttgataaattcaccacctatttcagcggcttttatgagaatcgcaaaaacgtgtttagcgcagaagatattagcaccgcaattccgcatcgtattgtgcaggataatttcccgaaattcaaagagaactgccacatttttacccgtctgattaccgcagttccgagcctgcgtgaacattttgaaaacgttaaaaaagccatcggcatctttgttagcaccagcattgaagaagtttttagcttcccgttttacaatcagctgctgacccagacccagattgatctgtataaccaactgctgggtggtattagccgtgaagcaggcaccgaaaaaatcaaaggtctgaatgaagtgctgaatctggccattcagaaaaatgatgaaaccgcacatattattgcaagcctgccgcatcgttttattccgctgttcaaacaaattctgagcgatcgtaataccctgagctttattctggaagaattcaaatccgatgaagaggtgattcagagcttttgcaaatacaaaacgctgctgcgcaatgaaaatgttctggaaactgccgaagcactgtttaacgaactgaatagcattgatctgacccacatctttatcagccacaaaaaactggaaaccatttcaagcgcactgtgtgatcattgggataccctgcgtaatgccctgtatgaacgtcgtattagcgaactgaccggtaaaattaccaaaagcgcgaaagaaaaagttcagcgcagtctgaaacatgaggatattaatctgcaagagattattagcgcagccggtaaagaactgtcagaagcatttaaacagaaaaccagcgaaattctgtcacatgcacatgcagcactggatcagccgctgccgaccaccctgaaaaaacaagaagaaaaagaaatcctgaaaagccagctggatagcctgctgggtctgtatcatctgctggactggtttgcagttgatgaaagcaatgaagttgatccggaatttagcgcacgtctgaccggcattaaactggaaatggaaccgagcctgagcttttataacaaagcccgtaattatgccaccaaaaaaccgtatagcgtcgaaaaattcaaactgaactttcagatgccgaccctggcaagcggttgggatgttaataaagaaaaaaacaacggtgccatcctgttcgtgaaaaatggcctgtattatctgggtattatgccgaaacagaaaggtcgttataaagcgctgagctttgaaccgacggaaaaaaccagtgaaggttttgataaaatgtactacgactattttccggatgcagccaaaatgattccgaaatgtagcacccagctgaaagcagttaccgcacattttcagacccataccaccccgattctgctgagcaataactttattgaaccgctggaaatcaccaaagagatctacgatctgaataacccggaaaaagagccgaaaaaattccagaccgcatatgcaaaaaaaaccggtgatcagaaaggttatcgtgaagcgctgtgtaaatggattgatttcacccgtgattttctgagcaaatacaccaaaaccaccagtatcgatctgagcagcctgcgtccgagcagccagtataaagatctgggcgaatattatgcagaactgaatccgctgctgtatcatattagctttcagcgtattgccgagaaagaaatcatggacgcagttgaaaccggtaaactgtacctgttccagatctacaataaagattttgccaaaggccatcatggcaaaccgaatctgcataccctgtattggaccggtctgtttagccctgaaaatctggcaaaaacctcgattaaactgaatggtcaggcggaactgttttatcgtccgaaaagccgtatgaaacgtatggcacatcgtctgggtgaaaaaatgctgaacaaaaaactgaaagaccagaaaaccccgatcccggatacactgtatcaagaactgtatgattatgtgaaccatcgtctgagccatgatctgagtgatgaagcacgtgccctgctgccgaatgttattaccaaagaagttagccacgagatcattaaagatcgtcgttttaccagcgacaaattcttttttcatgtgccgattaccctgaattatcaggcagcaaatagcccgagcaaatttaaccagcgtgttaatgcatatctgaaagaacatccagaaacgccgattattggtattgatcgtggtgaacgtaacctgatttatatcaccgttattgatagcaccggcaaaatcctggaacagcgtagcctgaataccattcagcagtttgattaccagaaaaaactggataatcgcgagaaagaacgtgttgcagcacgtcaggcatggtcagttgttggtacaattaaagacctgaaacagggttatctgagccaggttattcatgaaattgtggatctgatgattcactatcaggccgttgttgtgctggaaaacctgaattttggctttaaaagcaaacgtaccggcattgcagaaaaagcagtttatcagcagttcgagaaaatgctgattgacaaactgaattgcctggtgctgaaagattatccggctgaaaaagttggtggtgttctgaatccgtatcagctgaccgatcagtttaccagctttgcaaaaatgggcacccagagcggatttctgttttatgttccggcaccgtatacgagcaaaattgatccgctgaccggttttgttgatccgtttgtttggaaaaccatcaaaaaccatgaaagccgcaaacattttctggaaggtttcgattttctgcattacgacgttaaaacgggtgatttcatcctgcactttaaaatgaatcgcaatctgagttttcagcgtggcctgcctggttttatgcctgcatgggatattgtgtttgagaaaaacgaaacacagttcgatgcaaaaggcaccccgtttattgcaggtaaacgtattgttccggtgattgaaaatcatcgtttcaccggtcgttatcgcgatctgtatccggcaaatgaactgatcgcactgctggaagagaaaggtattgtttttcgtgatggctcaaacattctgccgaaactgctggaaaatgatgatagccatgcaattgataccatggttgcactgattcgtagcgttctgcagatgcgtaatagcaatgcagcaaccggtgaagattacattaatagtccggttcgtgatctgaatggtgtttgttttgatagccgttttcagaatccggaatggccgatggatgcagatgcaaatggtgcatatcatattgcactgaaaggacagctgctgctgaaccacctgaaagaaagcaaagatctgaaactgcaaaacggcattagcaatcaggattggctggcatatatccaagaactgcgtaaccctaaaaaaaaacgcaaagtgaagcttgcggccgcactcgagcaccaccaccaccaccactga

SEQ ID NO: 7 - DNA, 4014 bp, Artificial Sequence
  SYNTHETIC
atgccgaaaaaaaaacgcaaagtgggtattcatggtgttccggcagcaacccagtttgaaggtttcaccaatctgtatcaggttagcaaaaccctgcgttttgaactgattccgcagggtaaaaccctgaaacatattcaagaacagggcttcatcgaagaggataaagcacgtaacgatcactacaaagaactgaaaccgattatcgaccgcatctataaaacctatgcagatcagtgtctgcagctggttcagctggattgggaaaatctgagcgcagcaattgatagttatcgcaaagaaaaaaccgaagaaacccgtaatgcactgattgaagaacaggcaacctatcgtaatgccatccatgattatttcattggtcgtaccgataatctgaccgatgcaattaacaaacgtcacgccgaaatctataaaggcctgtttaaagccgaactgtttaatggcaaagttctgaaacagctgggcaccgttaccaccaccgaacatgaaaatgcactgctgcgtagctttgataaattcaccacctatttcagcggcttttatgagaatcgcaaaaacgtgtttagcgcagaagatattagcaccgcaattccgcatcgtattgtgcaggataatttcccgaaattcaaagagaactgccacatttttacccgtctgattaccgcagttccgagcctgcgtgaacattttgaaaacgttaaaaaagccatcggcatctttgttagcaccagcattgaagaagtttttagcttcccgttttacaatcagctgctgacccagacccagattgatctgtataaccaactgctgggtggtattagccgtgaagcaggcaccgaaaaaatcaaaggtctgaatgaagtgctgaatctggccattcagaaaaatgatgaaaccgcacatattattgcaagcctgccgcatcgttttattccgctgttcaaacaaattctgagcgatcgtaataccctgagctttattctggaagaattcaaatccgatgaagaggtgattcagagcttttgcaaatacaaaacgctgctgcgcaatgaaaatgttctggaaactgccgaagcactgtttaacgaactgaatagcattgatctgacccacatctttatcagccacaaaaaactggaaaccatttcaagcgcactgtgtgatcattgggataccctgcgtaatgccctgtatgaacgtcgtattagcgaactgaccggtaaaattaccaaaagcgcgaaagaaaaagttcagcgcagtctgaaacatgaggatattaatctgcaagagattattagcgcagccggtaaagaactgtcagaagcatttaaacagaaaaccagcgaaattctgtcacatgcacatgcagcactggatcagccgctgccgaccaccctgaaaaaacaagaagaaaaagaaatcctgaaaagccagctggatagcctgctgggtctgtatcatctgctggactggtttgcagttgatgaaagcaatgaagttgatccggaatttagcgcacgtctgaccggcattaaactggaaatggaaccgagcctgagcttttataacaaagcccgtaattatgccaccaaaaaaccgtatagcgtcgaaaaattcaaactgaactttcagatgccgaccctggcaagcggttgggatgttaataaagaaaaaaacaacggtgccatcctgttcgtgaaaaatggcctgtattatctgggtattatgccgaaacagaaaggtcgttataaagcgctgagctttgaaccgacggaaaaaaccagtgaaggttttgataaaatgtactacgactattttccggatgcagccaaaatgattccgaaatgtagcacccagctgaaagcagttaccgcacattttcagacccataccaccccgattctgctgagcaataactttattgaaccgctggaaatcaccaaagagatctacgatctgaataacccggaaaaagagccgaaaaaattccagaccgcatatgcaaaaaaaaccggtgatcagaaaggttatcgtgaagcgctgtgtaaatggattgatttcacccgtgattttctgagcaaatacaccaaaaccaccagtatcgatctgagcagcctgcgtccgagcagccagtataaagatctgggcgaatattatgcagaactgaatccgctgctgtatcatattagctttcagcgtattgccgagaaagaaatcatggacgcagttgaaaccggtaaactgtacctgttccagatctacaataaagattttgccaaaggccatcatggcaaaccgaatctgcataccctgtattggaccggtctgtttagccctgaaaatctggcaaaaacctcgattaaactgaatggtcaggcggaactgttttatcgtccgaaaagccgtatgaaacgtatggcacatcgtctgggtgaaaaaatgctgaacaaaaaactgaaagaccagaaaaccccgatcccggatacactgtatcaagaactgtatgattatgtgaaccatcgtctgagccatgatctgagtgatgaagcacgtgccctgctgccgaatgttattaccaaagaagttagccacgagatcattaaagatcgtcgttttaccagcgacaaattcttttttcatgtgccgattaccctgaattatcaggcagcaaatagcccgagcaaatttaaccagcgtgttaatgcatatctgaaagaacatccagaaacgccgattattggtattgatcgtggtgaacgtaacctgatttatatcaccgttattgatagcaccggcaaaatcctggaacagcgtagcctgaataccattcagcagtttgattaccagaaaaaactggataatcgcgagaaagaacgtgttgcagcacgtcaggcatggtcagttgttggtacaattaaagacctgaaacagggttatctgagccaggttattcatgaaattgtggatctgatgattcactatcaggccgttgttgtgctggaaaacctgaattttggctttaaaagcaaacgtaccggcattgcagaaaaagcagtttatcagcagttcgagaaaatgctgattgacaaactgaattgcctggtgctgaaagattatccggctgaaaaagttggtggtgttctgaatccgtatcagctgaccgatcagtttaccagctttgcaaaaatgggcacccagagcggatttctgttttatgttccggcaccgtatacgagcaaaattgatccgctgaccggttttgttgatccgtttgtttggaaaaccatcaaaaaccatgaaagccgcaaacattttctggaaggtttcgattttctgcattacgacgttaaaacgggtgatttcatcctgcactttaaaatgaatcgcaatctgagttttcagcgtggcctgcctggttttatgcctgcatgggatattgtgtttgagaaaaacgaaacacagttcgatgcaaaaggcaccccgtttattgcaggtaaacgtattgttccggtgattgaaaatcatcgtttcaccggtcgttatcgcgatctgtatccggcaaatgaactgatcgcactgctggaagagaaaggtattgtttttcgtgatggctcaaacattctgccgaaactgctggaaaatgatgatagccatgcaattgataccatggttgcactgattcgtagcgttctgcagatgcgtaatagcaatgcagcaaccggtgaagattacattaatagtccggttcgtgatctgaatggtgtttgttttgatagccgttttcagaatccggaatggccgatggatgcagatgcaaatggtgcatatcatattgcactgaaaggacagctgctgctgaaccacctgaaagaaagcaaagatctgaaactgcaaaacggcattagcaatcaggattggctggcatatatccaagaactgcgtaacccgaaaaaaaaacgcaaagtgctcgagcaccaccaccaccaccactga

SEQ ID NO: 8 - DNA, 3969 bp, Artificial Sequence
  SYNTHETIC
atgacccagtttgaaggtttcaccaatctgtatcaggttagcaaaaccctgcgttttgaactgattccgcagggtaaaaccctgaaacatattcaagaacagggcttcatcgaagaggataaagcacgtaacgatcactacaaagaactgaaaccgattatcgaccgcatctataaaacctatgcagatcagtgtctgcagctggttcagctggattgggaaaatctgagcgcagcaattgatagttatcgcaaagaaaaaaccgaagaaacccgtaatgcactgattgaagaacaggcaacctatcgtaatgccatccatgattatttcattggtcgtaccgataatctgaccgatgcaattaacaaacgtcacgccgaaatctataaaggcctgtttaaagccgaactgtttaatggcaaagttctgaaacagctgggcaccgttaccaccaccgaacatgaaaatgcactgctgcgtagctttgataaattcaccacctatttcagcggcttttatgagaatcgcaaaaacgtgtttagcgcagaagatattagcaccgcaattccgcatcgtattgtgcaggataatttcccgaaattcaaagagaactgccacatttttacccgtctgattaccgcagttccgagcctgcgtgaacattttgaaaacgttaaaaaagccatcggcatctttgttagcaccagcattgaagaagtttttagcttcccgttttacaatcagctgctgacccagacccagattgatctgtataaccaactgctgggtggtattagccgtgaagcaggcaccgaaaaaatcaaaggtctgaatgaagtgctgaatctggccattcagaaaaatgatgaaaccgcacatattattgcaagcctgccgcatcgttttattccgctgttcaaacaaattctgagcgatcgtaataccctgagctttattctggaagaattcaaatccgatgaagaggtgattcagagcttttgcaaatacaaaacgctgctgcgcaatgaaaatgttctggaaactgccgaagcactgtttaacgaactgaatagcattgatctgacccacatctttatcagccacaaaaaactggaaaccatttcaagcgcactgtgtgatcattgggataccctgcgtaatgccctgtatgaacgtcgtattagcgaactgaccggtaaaattaccaaaagcgcgaaagaaaaagttcagcgcagtctgaaacatgaggatattaatctgcaagagattattagcgcagccggtaaagaactgtcagaagcatttaaacagaaaaccagcgaaattctgtcacatgcacatgcagcactggatcagccgctgccgaccaccctgaaaaaacaagaagaaaaagaaatcctgaaaagccagctggatagcctgctgggtctgtatcatctgctggactggtttgcagttgatgaaagcaatgaagttgatccggaatttagcgcacgtctgaccggcattaaactggaaatggaaccgagcctgagcttttataacaaagcccgtaattatgccaccaaaaaaccgtatagcgtcgaaaaattcaaactgaactttcagatgccgaccctggcaagcggttgggatgttaataaagaaaaaaacaacggtgccatcctgttcgtgaaaaatggcctgtattatctgggtattatgccgaaacagaaaggtcgttataaagcgctgagctttgaaccgacggaaaaaaccagtgaaggttttgataaaatgtactacgactattttccggatgcagccaaaatgattccgaaatgtagcacccagctgaaagcagttaccgcacattttcagacccataccaccccgattctgctgagcaataactttattgaaccgctggaaatcaccaaagagatctacgatctgaataacccggaaaaagagccgaaaaaattccagaccgcatatgcaaaaaaaaccggtgatcagaaaggttatcgtgaagcgctgtgtaaatggattgatttcacccgtgattttctgagcaaatacaccaaaaccaccagtatcgatctgagcagcctgcgtccgagcagccagtataaagatctgggcgaatattatgcagaactgaatccgctgctgtatcatattagctttcagcgtattgccgagaaagaaatcatggacgcagttgaaaccggtaaactgtacctgttccagatctacaataaagattttgccaaaggccatcatggcaaaccgaatctgcataccctgtattggaccggtctgtttagccctgaaaatctggcaaaaacctcgattaaactgaatggtcaggcggaactgttttatcgtccgaaaagccgtatgaaacgtatggcacatcgtctgggtgaaaaaatgctgaacaaaaaactgaaagaccagaaaaccccgatcccggatacactgtatcaagaactgtatgattatgtgaaccatcgtctgagccatgatctgagtgatgaagcacgtgccctgctgccgaatgttattaccaaagaagttagccacgagatcattaaagatcgtcgttttaccagcgacaaattcttttttcatgtgccgattaccctgaattatcaggcagcaaatagcccgagcaaatttaaccagcgtgttaatgcatatctgaaagaacatccagaaacgccgattattggtattgatcgtggtgaacgtaacctgatttatatcaccgttattgatagcaccggcaaaatcctggaacagcgtagcctgaataccattcagcagtttgattaccagaaaaaactggataatcgcgagaaagaacgtgttgcagcacgtcaggcatggtcagttgttggtacaattaaagacctgaaacagggttatctgagccaggttattcatgaaattgtggatctgatgattcactatcaggccgttgttgtgctggaaaacctgaattttggctttaaaagcaaacgtaccggcattgcagaaaaagcagtttatcagcagttcgagaaaatgctgattgacaaactgaattgcctggtgctgaaagattatccggctgaaaaagttggtggtgttctgaatccgtatcagctgaccgatcagtttaccagctttgcaaaaatgggcacccagagcggatttctgttttatgttccggcaccgtatacgagcaaaattgatccgctgaccggttttgttgatccgtttgtttggaaaaccatcaaaaaccatgaaagccgcaaacattttctggaaggtttcgattttctgcattacgacgttaaaacgggtgatttcatcctgcactttaaaatgaatcgcaatctgagttttcagcgtggcctgcctggttttatgcctgcatgggatattgtgtttgagaaaaacgaaacacagttcgatgcaaaaggcaccccgtttattgcaggtaaacgtattgttccggtgattgaaaatcatcgtttcaccggtcgttatcgcgatctgtatccggcaaatgaactgatcgcactgctggaagagaaaggtattgtttttcgtgatggctcaaacattctgccgaaactgctggaaaatgatgatagccatgcaattgataccatggttgcactgattcgtagcgttctgcagatgcgtaatagcaatgcagcaaccggtgaagattacattaatagtccggttcgtgatctgaatggtgtttgttttgatagccgttttcagaatccggaatggccgatggatgcagatgcaaatggtgcatatcatattgcactgaaaggacagctgctgctgaaccacctgaaagaaagcaaagatctgaaactgcaaaacggcattagcaatcaggattggctggcatatatccaagaactgcgtaacccgaaaaaaaaacgcaaagtgctcgagcaccaccaccaccaccactga

SEQ ID NO: 9 - DNA, 4191 bp, Artificial Sequence
  SYNTHETIC
atgggcagcagccatcatcatcatcatcacagcagcggcctggtgccgcgcggcagccatatggctagcatgactggtggacagcaaatgggtcgggatccaacccagtttgaaggtttcaccaatctgtatcaggttagcaaaaccctgcgttttgaactgattccgcagggtaaaaccctgaaacatattcaagaacagggcttcatcgaagaggataaagcacgtaacgatcactacaaagaactgaaaccgattatcgaccgcatctataaaacctatgcagatcagtgtctgcagctggttcagctggattgggaaaatctgagcgcagcaattgatagttatcgcaaagaaaaaaccgaagaaacccgtaatgcactgattgaagaacaggcaacctatcgtaatgccatccatgattatttcattggtcgtaccgataatctgaccgatgcaattaacaaacgtcacgccgaaatctataaaggcctgtttaaagccgaactgtttaatggcaaagttctgaaacagctgggcaccgttaccaccaccgaacatgaaaatgcactgctgcgtagctttgataaattcaccacctatttcagcggcttttatgagaatcgcaaaaacgtgtttagcgcagaagatattagcaccgcaattccgcatcgtattgtgcaggataatttcccgaaattcaaagagaactgccacatttttacccgtctgattaccgcagttccgagcctgcgtgaacattttgaaaacgttaaaaaagccatcggcatctttgttagcaccagcattgaagaagtttttagcttcccgttttacaatcagctgctgacccagacccagattgatctgtataaccaactgctgggtggtattagccgtgaagcaggcaccgaaaaaatcaaaggtctgaatgaagtgctgaatctggccattcagaaaaatgatgaaaccgcacatattattgcaagcctgccgcatcgttttattccgctgttcaaacaaattctgagcgatcgtaataccctgagctttattctggaagaattcaaatccgatgaagaggtgattcagagcttttgcaaatacaaaacgctgctgcgcaatgaaaatgttctggaaactgccgaagcactgtttaacgaactgaatagcattgatctgacccacatctttatcagccacaaaaaactggaaaccatttcaagcgcactgtgtgatcattgggataccctgcgtaatgccctgtatgaacgtcgtattagcgaactgaccggtaaaattaccaaaagcgcgaaagaaaaagttcagcgcagtctgaaacatgaggatattaatctgcaagagattattagcgcagccggtaaagaactgtcagaagcatttaaacagaaaaccagcgaaattctgtcacatgcacatgcagcactggatcagccgctgccgaccaccctgaaaaaacaagaagaaaaagaaatcctgaaaagccagctggatagcctgctgggtctgtatcatctgctggactggtttgcagttgatgaaagcaatgaagttgatccggaatttagcgcacgtctgaccggcattaaactggaaatggaaccgagcctgagcttttataacaaagcccgtaattatgccaccaaaaaaccgtatagcgtcgaaaaattcaaactgaactttcagatgccgaccctggcaagcggttgggatgttaataaagaaaaaaacaacggtgccatcctgttcgtgaaaaatggcctgtattatctgggtattatgccgaaacagaaaggtcgttataaagcgctgagctttgaaccgacggaaaaaaccagtgaaggttttgataaaatgtactacgactattttccggatgcagccaaaatgattccgaaatgtagcacccagctgaaagcagttaccgcacattttcagacccataccaccccgattctgctgagcaataactttattgaaccgctggaaatcaccaaagagatctacgatctgaataacccggaaaaagagccgaaaaaattccagaccgcatatgcaaaaaaaaccggtgatcagaaaggttatcgtgaagcgctgtgtaaatggattgatttcacccgtgattttctgagcaaatacaccaaaaccaccagtatcgatctgagcagcctgcgtccgagcagccagtataaagatctgggcgaatattatgcagaactgaatccgctgctgtatcatattagctttcagcgtattgccgagaaagaaatcatggacgcagttgaaaccggtaaactgtacctgttccagatctacaataaagattttgccaaaggccatcatggcaaaccgaatctgcataccctgtattggaccggtctgtttagccctgaaaatctggcaaaaacctcgattaaactgaatggtcaggcggaactgttttatcgtccgaaaagccgtatgaaacgtatggcacatcgtctgggtgaaaaaatgctgaacaaaaaactgaaagaccagaaaaccccgatcccggatacactgtatcaagaactgtatgattatgtgaaccatcgtctgagccatgatctgagtgatgaagcacgtgccctgctgccgaatgttattaccaaagaagttagccacgagatcattaaagatcgtcgttttaccagcgacaaattcttttttcatgtgccgattaccctgaattatcaggcagcaaatagcccgagcaaatttaaccagcgtgttaatgcatatctgaaagaacatccagaaacgccgattattggtattgatcgtggtgaacgtaacctgatttatatcaccgttattgatagcaccggcaaaatcctggaacagcgtagcctgaataccattcagcagtttgattaccagaaaaaactggataatcgcgagaaagaacgtgttgcagcacgtcaggcatggtcagttgttggtacaattaaagacctgaaacagggttatctgagccaggttattcatgaaattgtggatctgatgattcactatcaggccgttgttgtgctggaaaacctgaattttggctttaaaagcaaacgtaccggcattgcagaaaaagcagtttatcagcagttcgagaaaatgctgattgacaaactgaattgcctggtgctgaaagattatccggctgaaaaagttggtggtgttctgaatccgtatcagctgaccgatcagtttaccagctttgcaaaaatgggcacccagagcggatttctgttttatgttccggcaccgtatacgagcaaaattgatccgctgaccggttttgttgatccgtttgtttggaaaaccatcaaaaaccatgaaagccgcaaacattttctggaaggtttcgattttctgcattacgacgttaaaacgggtgatttcatcctgcactttaaaatgaatcgcaatctgagttttcagcgtggcctgcctggttttatgcctgcatgggatattgtgtttgagaaaaacgaaacacagttcgatgcaaaaggcaccccgtttattgcaggtaaacgtattgttccggtgattgaaaatcatcgtttcaccggtcgttatcgcgatctgtatccggcaaatgaactgatcgcactgctggaagagaaaggtattgtttttcgtgatggctcaaacattctgccgaaactgctggaaaatgatgatagccatgcaattgataccatggttgcactgattcgtagcgttctgcagatgcgtaatagcaatgcagcaaccggtgaagattacattaatagtccggttcgtgatctgaatggtgtttgttttgatagccgttttcagaatccggaatggccgatggatgcagatgcaaatggtgcatatcatattgcactgaaaggacagctgctgctgaaccacctgaaagaaagcaaagatctgaaactgcaaaacggcattagcaatcaggattggctggcatatatccaagaactgcgtaacggtcgtagcagtgatgatgaagcaaccgcagatagccagcatgcagcaccgcctaaaaagaaacgtaaagttggtggtagcggtggttcaggtggtagtggcggtagtggtggctcagggggttctggtggctctggtggtagcctcgagcaccaccaccaccaccactga

SEQ ID NO: 10 - DNA, 4092 bp, Artificial Sequence
  SYNTHETIC
atgacccagtttgaaggtttcaccaatctgtatcaggttagcaaaaccctgcgttttgaactgattccgcagggtaaaaccctgaaacatattcaagaacagggcttcatcgaagaggataaagcacgtaacgatcactacaaagaactgaaaccgattatcgaccgcatctataaaacctatgcagatcagtgtctgcagctggttcagctggattgggaaaatctgagcgcagcaattgatagttatcgcaaagaaaaaaccgaagaaacccgtaatgcactgattgaagaacaggcaacctatcgtaatgccatccatgattatttcattggtcgtaccgataatctgaccgatgcaattaacaaacgtcacgccgaaatctataaaggcctgtttaaagccgaactgtttaatggcaaagttctgaaacagctgggcaccgttaccaccaccgaacatgaaaatgcactgctgcgtagctttgataaattcaccacctatttcagcggcttttatgagaatcgcaaaaacgtgtttagcgcagaagatattagcaccgcaattccgcatcgtattgtgcaggataatttcccgaaattcaaagagaactgccacatttttacccgtctgattaccgcagttccgagcctgcgtgaacattttgaaaacgttaaaaaagccatcggcatctttgttagcaccagcattgaagaagtttttagcttcccgttttacaatcagctgctgacccagacccagattgatctgtataaccaactgctgggtggtattagccgtgaagcaggcaccgaaaaaatcaaaggtctgaatgaagtgctgaatctggccattcagaaaaatgatgaaaccgcacatattattgcaagcctgccgcatcgttttattccgctgttcaaacaaattctgagcgatcgtaataccctgagctttattctggaagaattcaaatccgatgaagaggtgattcagagcttttgcaaatacaaaacgctgctgcgcaatgaaaatgttctggaaactgccgaagcactgtttaacgaactgaatagcattgatctgacccacatctttatcagccacaaaaaactggaaaccatttcaagcgcactgtgtgatcattgggataccctgcgtaatgccctgtatgaacgtcgtattagcgaactgaccggtaaaattaccaaaagcgcgaaagaaaaagttcagcgcagtctgaaacatgaggatattaatctgcaagagattattagcgcagccggtaaagaactgtcagaagcatttaaacagaaaaccagcgaaattctgtcacatgcacatgcagcactggatcagccgctgccgaccaccctgaaaaaacaagaagaaaaagaaatcctgaaaagccagctggatagcctgctgggtctgtatcatctgctggactggtttgcagttgatgaaagcaatgaagttgatccggaatttagcgcacgtctgaccggcattaaactggaaatggaaccgagcctgagcttttataacaaagcccgtaattatgccaccaaaaaaccgtatagcgtcgaaaaattcaaactgaactttcagatgccgaccctggcaagcggttgggatgttaataaagaaaaaaacaacggtgccatcctgttcgtgaaaaatggcctgtattatctgggtattatgccgaaacagaaaggtcgttataaagcgctgagctttgaaccgacggaaaaaaccagtgaaggttttgataaaatgtactacgactattttccggatgcagccaaaatgattccgaaatgtagcacccagctgaaagcagttaccgcacattttcagacccataccaccccgattctgctgagcaataactttattgaaccgctggaaatcaccaaagagatctacgatctgaataacccggaaaaagagccgaaaaaattccagaccgcatatgcaaaaaaaaccggtgatcagaaaggttatcgtgaagcgctgtgtaaatggattgatttcacccgtgattttctgagcaaatacaccaaaaccaccagtatcgatctgagcagcctgcgtccgagcagccagtataaagatctgggcgaatattatgcagaactgaatccgctgctgtatcatattagctttcagcgtattgccgagaaagaaatcatggacgcagttgaaaccggtaaactgtacctgttccagatctacaataaagattttgccaaaggccatcatggcaaaccgaatctgcataccctgtattggaccggtctgtttagccctgaaaatctggcaaaaacctcgattaaactgaatggtcaggcggaactgttttatcgtccgaaaagccgtatgaaacgtatggcacatcgtctgggtgaaaaaatgctgaacaaaaaactgaaagaccagaaaaccccgatcccggatacactgtatcaagaactgtatgattatgtgaaccatcgtctgagccatgatctgagtgatgaagcacgtgccctgctgccgaatgttattaccaaagaagttagccacgagatcattaaagatcgtcgttttaccagcgacaaattcttttttcatgtgccgattaccctgaattatcaggcagcaaatagcccgagcaaatttaaccagcgtgttaatgcatatctgaaagaacatccagaaacgccgattattggtattgatcgtggtgaacgtaacctgatttatatcaccgttattgatagcaccggcaaaatcctggaacagcgtagcctgaataccattcagcagtttgattaccagaaaaaactggataatcgcgagaaagaacgtgttgcagcacgtcaggcatggtcagttgttggtacaattaaagacctgaaacagggttatctgagccaggttattcatgaaattgtggatctgatgattcactatcaggccgttgttgtgctggaaaacctgaattttggctttaaaagcaaacgtaccggcattgcagaaaaagcagtttatcagcagttcgagaaaatgctgattgacaaactgaattgcctggtgctgaaagattatccggctgaaaaagttggtggtgttctgaatccgtatcagctgaccgatcagtttaccagctttgcaaaaatgggcacccagagcggatttctgttttatgttccggcaccgtatacgagcaaaattgatccgctgaccggttttgttgatccgtttgtttggaaaaccatcaaaaaccatgaaagccgcaaacattttctggaaggtttcgattttctgcattacgacgttaaaacgggtgatttcatcctgcactttaaaatgaatcgcaatctgagttttcagcgtggcctgcctggttttatgcctgcatgggatattgtgtttgagaaaaacgaaacacagttcgatgcaaaaggcaccccgtttattgcaggtaaacgtattgttccggtgattgaaaatcatcgtttcaccggtcgttatcgcgatctgtatccggcaaatgaactgatcgcactgctggaagagaaaggtattgtttttcgtgatggctcaaacattctgccgaaactgctggaaaatgatgatagccatgcaattgataccatggttgcactgattcgtagcgttctgcagatgcgtaatagcaatgcagcaaccggtgaagattacattaatagtccggttcgtgatctgaatggtgtttgttttgatagccgttttcagaatccggaatggccgatggatgcagatgcaaatggtgcatatcatattgcactgaaaggacagctgctgctgaaccacctgaaagaaagcaaagatctgaaactgcaaaacggcattagcaatcaggattggctggcatatatccaagaactgcgtaacggtcgtagcagtgatgatgaagcaaccgcagatagccagcatgcagcaccgcctaaaaagaaacgtaaagttggtggtagcggtggttcaggtggtagtggcggtagtggtggctcagggggttctggtggctctggtggtagcctcgagcaccaccaccaccaccactga

SEQ ID NO: 11 - DNA, 4173 bp, Artificial Sequence
  SYNTHETIC
atgggcagcagcagcagcggcctggtgccgcgcggcagccatatggctagcatgactggtggacagcaaatgggtcgggatccaacccagtttgaaggtttcaccaatctgtatcaggttagcaaaaccctgcgttttgaactgattccgcagggtaaaaccctgaaacatattcaagaacagggcttcatcgaagaggataaagcacgtaacgatcactacaaagaactgaaaccgattatcgaccgcatctataaaacctatgcagatcagtgtctgcagctggttcagctggattgggaaaatctgagcgcagcaattgatagttatcgcaaagaaaaaaccgaagaaacccgtaatgcactgattgaagaacaggcaacctatcgtaatgccatccatgattatttcattggtcgtaccgataatctgaccgatgcaattaacaaacgtcacgccgaaatctataaaggcctgtttaaagccgaactgtttaatggcaaagttctgaaacagctgggcaccgttaccaccaccgaacatgaaaatgcactgctgcgtagctttgataaattcaccacctatttcagcggcttttatgagaatcgcaaaaacgtgtttagcgcagaagatattagcaccgcaattccgcatcgtattgtgcaggataatttcccgaaattcaaagagaactgccacatttttacccgtctgattaccgcagttccgagcctgcgtgaacattttgaaaacgttaaaaaagccatcggcatctttgttagcaccagcattgaagaagtttttagcttcccgttttacaatcagctgctgacccagacccagattgatctgtataaccaactgctgggtggtattagccgtgaagcaggcaccgaaaaaatcaaaggtctgaatgaagtgctgaatctggccattcagaaaaatgatgaaaccgcacatattattgcaagcctgccgcatcgttttattccgctgttcaaacaaattctgagcgatcgtaataccctgagctttattctggaagaattcaaatccgatgaagaggtgattcagagcttttgcaaatacaaaacgctgctgcgcaatgaaaatgttctggaaactgccgaagcactgtttaacgaactgaatagcattgatctgacccacatctttatcagccacaaaaaactggaaaccatttcaagcgcactgtgtgatcattgggataccctgcgtaatgccctgtatgaacgtcgtattagcgaactgaccggtaaaattaccaaaagcgcgaaagaaaaagttcagcgcagtctgaaacatgaggatattaatctgcaagagattattagcgcagccggtaaagaactgtcagaagcatttaaacagaaaaccagcgaaattctgtcacatgcacatgcagcactggatcagccgctgccgaccaccctgaaaaaacaagaagaaaaagaaatcctgaaaagccagctggatagcctgctgggtctgtatcatctgctggactggtttgcagttgatgaaagcaatgaagttgatccggaatttagcgcacgtctgaccggcattaaactggaaatggaaccgagcctgagcttttataacaaagcccgtaattatgccaccaaaaaaccgtatagcgtcgaaaaattcaaactgaactttcagatgccgaccctggcaagcggttgggatgttaataaagaaaaaaacaacggtgccatcctgttcgtgaaaaatggcctgtattatctgggtattatgccgaaacagaaaggtcgttataaagcgctgagctttgaaccgacggaaaaaaccagtgaaggttttgataaaatgtactacgactattttccggatgcagccaaaatgattccgaaatgtagcacccagctgaaagcagttaccgcacattttcagacccataccaccccgattctgctgagcaataactttattgaaccgctggaaatcaccaaagagatctacgatctgaataacccggaaaaagagccgaaaaaattccagaccgcatatgcaaaaaaaaccggtgatcagaaaggttatcgtgaagcgctgtgtaaatggattgatttcacccgtgattttctgagcaaatacaccaaaaccaccagtatcgatctgagcagcctgcgtccgagcagccagtataaagatctgggcgaatattatgcagaactgaatccgctgctgtatcatattagctttcagcgtattgccgagaaagaaatcatggacgcagttgaaaccggtaaactgtacctgttccagatctacaataaagattttgccaaaggccatcatggcaaaccgaatctgcataccctgtattggaccggtctgtttagccctgaaaatctggcaaaaacctcgattaaactgaatggtcaggcggaactgttttatcgtccgaaaagccgtatgaaacgtatggcacatcgtctgggtgaaaaaatgctgaacaaaaaactgaaagaccagaaaaccccgatcccggatacactgtatcaagaactgtatgattatgtgaaccatcgtctgagccatgatctgagtgatgaagcacgtgccctgctgccgaatgttattaccaaagaagttagccacgagatcattaaagatcgtcgttttaccagcgacaaattcttttttcatgtgccgattaccctgaattatcaggcagcaaatagcccgagcaaatttaaccagcgtgttaatgcatatctgaaagaacatccagaaacgccgattattggtattgatcgtggtgaacgtaacctgatttatatcaccgttattgatagcaccggcaaaatcctggaacagcgtagcctgaataccattcagcagtttgattaccagaaaaaactggataatcgcgagaaagaacgtgttgcagcacgtcaggcatggtcagttgttggtacaattaaagacctgaaacagggttatctgagccaggttattcatgaaattgtggatctgatgattcactatcaggccgttgttgtgctggaaaacctgaattttggctttaaaagcaaacgtaccggcattgcagaaaaagcagtttatcagcagttcgagaaaatgctgattgacaaactgaattgcctggtgctgaaagattatccggctgaaaaagttggtggtgttctgaatccgtatcagctgaccgatcagtttaccagctttgcaaaaatgggcacccagagcggatttctgttttatgttccggcaccgtatacgagcaaaattgatccgctgaccggttttgttgatccgtttgtttggaaaaccatcaaaaaccatgaaagccgcaaacattttctggaaggtttcgattttctgcattacgacgttaaaacgggtgatttcatcctgcactttaaaatgaatcgcaatctgagttttcagcgtggcctgcctggttttatgcctgcatgggatattgtgtttgagaaaaacgaaacacagttcgatgcaaaaggcaccccgtttattgcaggtaaacgtattgttccggtgattgaaaatcatcgtttcaccggtcgttatcgcgatctgtatccggcaaatgaactgatcgcactgctggaagagaaaggtattgtttttcgtgatggctcaaacattctgccgaaactgctggaaaatgatgatagccatgcaattgataccatggttgcactgattcgtagcgttctgcagatgcgtaatagcaatgcagcaaccggtgaagattacattaatagtccggttcgtgatctgaatggtgtttgttttgatagccgttttcagaatccggaatggccgatggatgcagatgcaaatggtgcatatcatattgcactgaaaggacagctgctgctgaaccacctgaaagaaagcaaagatctgaaactgcaaaacggcattagcaatcaggattggctggcatatatccaagaactgcgtaacggtcgtagcagtgatgatgaagcaaccgcagatagccagcatgcagcaccgcctaaaaagaaacgtaaagttggtggtagcggtggttcaggtggtagtggcggtagtggtggctcagggggttctggtggctctggtggtagcctcgagcaccaccaccaccaccactga

SEQ ID NO: 12 - DNA, 4143 bp, Artificial Sequence
  SYNTHETIC
atgccgcctccgaaacgtccgcgtctggatggtatccacggagtcccagcagccacccagtttgaaggtttcaccaatctgtatcaggttagcaaaaccctgcgttttgaactgattccgcagggtaaaaccctgaaacatattcaagaacagggcttcatcgaagaggataaagcacgtaacgatcactacaaagaactgaaaccgattatcgaccgcatctataaaacctatgcagatcagtgtctgcagctggttcagctggattgggaaaatctgagcgcagcaattgatagttatcgcaaagaaaaaaccgaagaaacccgtaatgcactgattgaagaacaggcaacctatcgtaatgccatccatgattatttcattggtcgtaccgataatctgaccgatgcaattaacaaacgtcacgccgaaatctataaaggcctgtttaaagccgaactgtttaatggcaaagttctgaaacagctgggcaccgttaccaccaccgaacatgaaaatgcactgctgcgtagctttgataaattcaccacctatttcagcggcttttatgagaatcgcaaaaacgtgtttagcgcagaagatattagcaccgcaattccgcatcgtattgtgcaggataatttcccgaaattcaaagagaactgccacatttttacccgtctgattaccgcagttccgagcctgcgtgaacattttgaaaacgttaaaaaagccatcggcatctttgttagcaccagcattgaagaagtttttagcttcccgttttacaatcagctgctgacccagacccagattgatctgtataaccaactgctgggtggtattagccgtgaagcaggcaccgaaaaaatcaaaggtctgaatgaagtgctgaatctggccattcagaaaaatgatgaaaccgcacatattattgcaagcctgccgcatcgttttattccgctgttcaaacaaattctgagcgatcgtaataccctgagctttattctggaagaattcaaatccgatgaagaggtgattcagagcttttgcaaatacaaaacgctgctgcgcaatgaaaatgttctggaaactgccgaagcactgtttaacgaactgaatagcattgatctgacccacatctttatcagccacaaaaaactggaaaccatttcaagcgcactgtgtgatcattgggataccctgcgtaatgccctgtatgaacgtcgtattagcgaactgaccggtaaaattaccaaaagcgcgaaagaaaaagttcagcgcagtctgaaacatgaggatattaatctgcaagagattattagcgcagccggtaaagaactgtcagaagcatttaaacagaaaaccagcgaaattctgtcacatgcacatgcagcactggatcagccgctgccgaccaccctgaaaaaacaagaagaaaaagaaatcctgaaaagccagctggatagcctgctgggtctgtatcatctgctggactggtttgcagttgatgaaagcaatgaagttgatccggaatttagcgcacgtctgaccggcattaaactggaaatggaaccgagcctgagcttttataacaaagcccgtaattatgccaccaaaaaaccgtatagcgtcgaaaaattcaaactgaactttcagatgccgaccctggcaagcggttgggatgttaataaagaaaaaaacaacggtgccatcctgttcgtgaaaaatggcctgtattatctgggtattatgccgaaacagaaaggtcgttataaagcgctgagctttgaaccgacggaaaaaaccagtgaaggttttgataaaatgtactacgactattttccggatgcagccaaaatgattccgaaatgtagcacccagctgaaagcagttaccgcacattttcagacccataccaccccgattctgctgagcaataactttattgaaccgctggaaatcaccaaagagatctacgatctgaataacccggaaaaagagccgaaaaaattccagaccgcatatgcaaaaaaaaccggtgatcagaaaggttatcgtgaagcgctgtgtaaatggattgatttcacccgtgattttctgagcaaatacaccaaaaccaccagtatcgatctgagcagcctgcgtccgagcagccagtataaagatctgggcgaatattatgcagaactgaatccgctgctgtatcatattagctttcagcgtattgccgagaaagaaatcatggacgcagttgaaaccggtaaactgtacctgttccagatctacaataaagattttgccaaaggccatcatggcaaaccgaatctgcataccctgtattggaccggtctgtttagccctgaaaatctggcaaaaacctcgattaaactgaatggtcaggcggaactgttttatcgtccgaaaagccgtatgaaacgtatggcacatcgtctgggtgaaaaaatgctgaacaaaaaactgaaagaccagaaaaccccgatcccggatacactgtatcaagaactgtatgattatgtgaaccatcgtctgagccatgatctgagtgatgaagcacgtgccctgctgccgaatgttattaccaaagaagttagccacgagatcattaaagatcgtcgttttaccagcgacaaattcttttttcatgtgccgattaccctgaattatcaggcagcaaatagcccgagcaaatttaaccagcgtgttaatgcatatctgaaagaacatccagaaacgccgattattggtattgatcgtggtgaacgtaacctgatttatatcaccgttattgatagcaccggcaaaatcctggaacagcgtagcctgaataccattcagcagtttgattaccagaaaaaactggataatcgcgagaaagaacgtgttgcagcacgtcaggcatggtcagttgttggtacaattaaagacctgaaacagggttatctgagccaggttattcatgaaattgtggatctgatgattcactatcaggccgttgttgtgctggaaaacctgaattttggctttaaaagcaaacgtaccggcattgcagaaaaagcagtttatcagcagttcgagaaaatgctgattgacaaactgaattgcctggtgctgaaagattatccggctgaaaaagttggtggtgttctgaatccgtatcagctgaccgatcagtttaccagctttgcaaaaatgggcacccagagcggatttctgttttatgttccggcaccgtatacgagcaaaattgatccgctgaccggttttgttgatccgtttgtttggaaaaccatcaaaaaccatgaaagccgcaaacattttctggaaggtttcgattttctgcattacgacgttaaaacgggtgatttcatcctgcactttaaaatgaatcgcaatctgagttttcagcgtggcctgcctggttttatgcctgcatgggatattgtgtttgagaaaaacgaaacacagttcgatgcaaaaggcaccccgtttattgcaggtaaacgtattgttccggtgattgaaaatcatcgtttcaccggtcgttatcgcgatctgtatccggcaaatgaactgatcgcactgctggaagagaaaggtattgtttttcgtgatggctcaaacattctgccgaaactgctggaaaatgatgatagccatgcaattgataccatggttgcactgattcgtagcgttctgcagatgcgtaatagcaatgcagcaaccggtgaagattacattaatagtccggttcgtgatctgaatggtgtttgttttgatagccgttttcagaatccggaatggccgatggatgcagatgcaaatggtgcatatcatattgcactgaaaggacagctgctgctgaaccacctgaaagaaagcaaagatctgaaactgcaaaacggcattagcaatcaggattggctggcatatatccaagaactgcgtaacggtcgtagcagtgatgatgaagcaaccgcagatagccagcatgcagcaccgcctaaaaagaaacgtaaagttggtggtagcggtggttcaggtggtagtggcggtagtggtggctcagggggttctggtggctctggtggtagcctcgagcaccaccaccaccaccactga

SEQ ID NO: 13 - DNA, 4182 bp, Artificial Sequence
  SYNTHETIC
atgagcagtgatgatgaagcaaccgcagatagccagcatgcagcaccgcctaaaaagaaacgtaaagttggtatccacggagtcccagcagccacccagtttgaaggtttcaccaatctgtatcaggttagcaaaaccctgcgttttgaactgattccgcagggtaaaaccctgaaacatattcaagaacagggcttcatcgaagaggataaagcacgtaacgatcactacaaagaactgaaaccgattatcgaccgcatctataaaacctatgcagatcagtgtctgcagctggttcagctggattgggaaaatctgagcgcagcaattgatagttatcgcaaagaaaaaaccgaagaaacccgtaatgcactgattgaagaacaggcaacctatcgtaatgccatccatgattatttcattggtcgtaccgataatctgaccgatgcaattaacaaacgtcacgccgaaatctataaaggcctgtttaaagccgaactgtttaatggcaaagttctgaaacagctgggcaccgttaccaccaccgaacatgaaaatgcactgctgcgtagctttgataaattcaccacctatttcagcggcttttatgagaatcgcaaaaacgtgtttagcgcagaagatattagcaccgcaattccgcatcgtattgtgcaggataatttcccgaaattcaaagagaactgccacatttttacccgtctgattaccgcagttccgagcctgcgtgaacattttgaaaacgttaaaaaagccatcggcatctttgttagcaccagcattgaagaagtttttagcttcccgttttacaatcagctgctgacccagacccagattgatctgtataaccaactgctgggtggtattagccgtgaagcaggcaccgaaaaaatcaaaggtctgaatgaagtgctgaatctggccattcagaaaaatgatgaaaccgcacatattattgcaagcctgccgcatcgttttattccgctgttcaaacaaattctgagcgatcgtaataccctgagctttattctggaagaattcaaatccgatgaagaggtgattcagagcttttgcaaatacaaaacgctgctgcgcaatgaaaatgttctggaaactgccgaagcactgtttaacgaactgaatagcattgatctgacccacatctttatcagccacaaaaaactggaaaccatttcaagcgcactgtgtgatcattgggataccctgcgtaatgccctgtatgaacgtcgtattagcgaactgaccggtaaaattaccaaaagcgcgaaagaaaaagttcagcgcagtctgaaacatgaggatattaatctgcaagagattattagcgcagccggtaaagaactgtcagaagcatttaaacagaaaaccagcgaaattctgtcacatgcacatgcagcactggatcagccgctgccgaccaccctgaaaaaacaagaagaaaaagaaatcctgaaaagccagctggatagcctgctgggtctgtatcatctgctggactggtttgcagttgatgaaagcaatgaagttgatccggaatttagcgcacgtctgaccggcattaaactggaaatggaaccgagcctgagcttttataacaaagcccgtaattatgccaccaaaaaaccgtatagcgtcgaaaaattcaaactgaactttcagatgccgaccctggcaagcggttgggatgttaataaagaaaaaaacaacggtgccatcctgttcgtgaaaaatggcctgtattatctgggtattatgccgaaacagaaaggtcgttataaagcgctgagctttgaaccgacggaaaaaaccagtgaaggttttgataaaatgtactacgactattttccggatgcagccaaaatgattccgaaatgtagcacccagctgaaagcagttaccgcacattttcagacccataccaccccgattctgctgagcaataactttattgaaccgctggaaatcaccaaagagatctacgatctgaataacccggaaaaagagccgaaaaaattccagaccgcatatgcaaaaaaaaccggtgatcagaaaggttatcgtgaagcgctgtgtaaatggattgatttcacccgtgattttctgagcaaatacaccaaaaccaccagtatcgatctgagcagcctgcgtccgagcagccagtataaagatctgggcgaatattatgcagaactgaatccgctgctgtatcatattagctttcagcgtattgccgagaaagaaatcatggacgcagttgaaaccggtaaactgtacctgttccagatctacaataaagattttgccaaaggccatcatggcaaaccgaatctgcataccctgtattggaccggtctgtttagccctgaaaatctggcaaaaacctcgattaaactgaatggtcaggcggaactgttttatcgtccgaaaagccgtatgaaacgtatggcacatcgtctgggtgaaaaaatgctgaacaaaaaactgaaagaccagaaaaccccgatcccggatacactgtatcaagaactgtatgattatgtgaaccatcgtctgagccatgatctgagtgatgaagcacgtgccctgctgccgaatgttattaccaaagaagttagccacgagatcattaaagatcgtcgttttaccagcgacaaattcttttttcatgtgccgattaccctgaattatcaggcagcaaatagcccgagcaaatttaaccagcgtgttaatgcatatctgaaagaacatccagaaacgccgattattggtattgatcgtggtgaacgtaacctgatttatatcaccgttattgatagcaccggcaaaatcctggaacagcgtagcctgaataccattcagcagtttgattaccagaaaaaactggataatcgcgagaaagaacgtgttgcagcacgtcaggcatggtcagttgttggtacaattaaagacctgaaacagggttatctgagccaggttattcatgaaattgtggatctgatgattcactatcaggccgttgttgtgctggaaaacctgaattttggctttaaaagcaaacgtaccggcattgcagaaaaagcagtttatcagcagttcgagaaaatgctgattgacaaactgaattgcctggtgctgaaagattatccggctgaaaaagttggtggtgttctgaatccgtatcagctgaccgatcagtttaccagctttgcaaaaatgggcacccagagcggatttctgttttatgttccggcaccgtatacgagcaaaattgatccgctgaccggttttgttgatccgtttgtttggaaaaccatcaaaaaccatgaaagccgcaaacattttctggaaggtttcgattttctgcattacgacgttaaaacgggtgatttcatcctgcactttaaaatgaatcgcaatctgagttttcagcgtggcctgcctggttttatgcctgcatgggatattgtgtttgagaaaaacgaaacacagttcgatgcaaaaggcaccccgtttattgcaggtaaacgtattgttccggtgattgaaaatcatcgtttcaccggtcgttatcgcgatctgtatccggcaaatgaactgatcgcactgctggaagagaaaggtattgtttttcgtgatggctcaaacattctgccgaaactgctggaaaatgatgatagccatgcaattgataccatggttgcactgattcgtagcgttctgcagatgcgtaatagcaatgcagcaaccggtgaagattacattaatagtccggttcgtgatctgaatggtgtttgttttgatagccgttttcagaatccggaatggccgatggatgcagatgcaaatggtgcatatcatattgcactgaaaggacagctgctgctgaaccacctgaaagaaagcaaagatctgaaactgcaaaacggcattagcaatcaggattggctggcatatatccaagaactgcgtaacggtcgtagcagtgatgatgaagcaaccgcagatagccagcatgcagcaccgcctaaaaagaaacgtaaagttggtggtagcggtggttcaggtggtagtggcggtagtggtggctcagggggttctggtggctctggtggtagcctcgagcaccaccaccaccaccactga

SEQ ID NO: 14 - DNA, 4074 bp, Artificial Sequence
  SYNTHETIC
atgacccagtttgaaggtttcaccaatctgtatcaggttagcaaaaccctgcgttttgaactgattccgcagggtaaaaccctgaaacatattcaagaacagggcttcatcgaagaggataaagcacgtaacgatcactacaaagaactgaaaccgattatcgaccgcatctataaaacctatgcagatcagtgtctgcagctggttcagctggattgggaaaatctgagcgcagcaattgatagttatcgcaaagaaaaaaccgaagaaacccgtaatgcactgattgaagaacaggcaacctatcgtaatgccatccatgattatttcattggtcgtaccgataatctgaccgatgcaattaacaaacgtcacgccgaaatctataaaggcctgtttaaagccgaactgtttaatggcaaagttctgaaacagctgggcaccgttaccaccaccgaacatgaaaatgcactgctgcgtagctttgataaattcaccacctatttcagcggcttttatgagaatcgcaaaaacgtgtttagcgcagaagatattagcaccgcaattccgcatcgtattgtgcaggataatttcccgaaattcaaagagaactgccacatttttacccgtctgattaccgcagttccgagcctgcgtgaacattttgaaaacgttaaaaaagccatcggcatctttgttagcaccagcattgaagaagtttttagcttcccgttttacaatcagctgctgacccagacccagattgatctgtataaccaactgctgggtggtattagccgtgaagcaggcaccgaaaaaatcaaaggtctgaatgaagtgctgaatctggccattcagaaaaatgatgaaaccgcacatattattgcaagcctgccgcatcgttttattccgctgttcaaacaaattctgagcgatcgtaataccctgagctttattctggaagaattcaaatccgatgaagaggtgattcagagcttttgcaaatacaaaacgctgctgcgcaatgaaaatgttctggaaactgccgaagcactgtttaacgaactgaatagcattgatctgacccacatctttatcagccacaaaaaactggaaaccatttcaagcgcactgtgtgatcattgggataccctgcgtaatgccctgtatgaacgtcgtattagcgaactgaccggtaaaattaccaaaagcgcgaaagaaaaagttcagcgcagtctgaaacatgaggatattaatctgcaagagattattagcgcagccggtaaagaactgtcagaagcatttaaacagaaaaccagcgaaattctgtcacatgcacatgcagcactggatcagccgctgccgaccaccctgaaaaaacaagaagaaaaagaaatcctgaaaagccagctggatagcctgctgggtctgtatcatctgctggactggtttgcagttgatgaaagcaatgaagttgatccggaatttagcgcacgtctgaccggcattaaactggaaatggaaccgagcctgagcttttataacaaagcccgtaattatgccaccaaaaaaccgtatagcgtcgaaaaattcaaactgaactttcagatgccgaccctggcaagcggttgggatgttaataaagaaaaaaacaacggtgccatcctgttcgtgaaaaatggcctgtattatctgggtattatgccgaaacagaaaggtcgttataaagcgctgagctttgaaccgacggaaaaaaccagtgaaggttttgataaaatgtactacgactattttccggatgcagccaaaatgattccgaaatgtagcacccagctgaaagcagttaccgcacattttcagacccataccaccccgattctgctgagcaataactttattgaaccgctggaaatcaccaaagagatctacgatctgaataacccggaaaaagagccgaaaaaattccagaccgcatatgcaaaaaaaaccggtgatcagaaaggttatcgtgaagcgctgtgtaaatggattgatttcacccgtgattttctgagcaaatacaccaaaaccaccagtatcgatctgagcagcctgcgtccgagcagccagtataaagatctgggcgaatattatgcagaactgaatccgctgctgtatcatattagctttcagcgtattgccgagaaagaaatcatggacgcagttgaaaccggtaaactgtacctgttccagatctacaataaagattttgccaaaggccatcatggcaaaccgaatctgcataccctgtattggaccggtctgtttagccctgaaaatctggcaaaaacctcgattaaactgaatggtcaggcggaactgttttatcgtccgaaaagccgtatgaaacgtatggcacatcgtctgggtgaaaaaatgctgaacaaaaaactgaaagaccagaaaaccccgatcccggatacactgtatcaagaactgtatgattatgtgaaccatcgtctgagccatgatctgagtgatgaagcacgtgccctgctgccgaatgttattaccaaagaagttagccacgagatcattaaagatcgtcgttttaccagcgacaaattcttttttcatgtgccgattaccctgaattatcaggcagcaaatagcccgagcaaatttaaccagcgtgttaatgcatatctgaaagaacatccagaaacgccgattattggtattgatcgtggtgaacgtaacctgatttatatcaccgttattgatagcaccggcaaaatcctggaacagcgtagcctgaataccattcagcagtttgattaccagaaaaaactggataatcgcgagaaagaacgtgttgcagcacgtcaggcatggtcagttgttggtacaattaaagacctgaaacagggttatctgagccaggttattcatgaaattgtggatctgatgattcactatcaggccgttgttgtgctggaaaacctgaattttggctttaaaagcaaacgtaccggcattgcagaaaaagcagtttatcagcagttcgagaaaatgctgattgacaaactgaattgcctggtgctgaaagattatccggctgaaaaagttggtggtgttctgaatccgtatcagctgaccgatcagtttaccagctttgcaaaaatgggcacccagagcggatttctgttttatgttccggcaccgtatacgagcaaaattgatccgctgaccggttttgttgatccgtttgtttggaaaaccatcaaaaaccatgaaagccgcaaacattttctggaaggtttcgattttctgcattacgacgttaaaacgggtgatttcatcctgcactttaaaatgaatcgcaatctgagttttcagcgtggcctgcctggttttatgcctgcatgggatattgtgtttgagaaaaacgaaacacagttcgatgcaaaaggcaccccgtttattgcaggtaaacgtattgttccggtgattgaaaatcatcgtttcaccggtcgttatcgcgatctgtatccggcaaatgaactgatcgcactgctggaagagaaaggtattgtttttcgtgatggctcaaacattctgccgaaactgctggaaaatgatgatagccatgcaattgataccatggttgcactgattcgtagcgttctgcagatgcgtaatagcaatgcagcaaccggtgaagattacattaatagtccggttcgtgatctgaatggtgtttgttttgatagccgttttcagaatccggaatggccgatggatgcagatgcaaatggtgcatatcatattgcactgaaaggacagctgctgctgaaccacctgaaagaaagcaaagatctgaaactgcaaaacggcattagcaatcaggattggctggcatatatccaagaactgcgtaacggtcgtaaacgtccggcagcaaccaaaaaagcaggtcaggcaaaaaagaaaaaaggtggtagcggtggttcaggtggtagtggcggtagtggtggctcagggggttctggtggctctggtggtagcctcgagcaccaccaccaccaccactga

SEQ ID NO: 15 - DNA, 4083 bp, Artificial Sequence
  SYNTHETIC
atgacccagtttgaaggtttcaccaatctgtatcaggttagcaaaaccctgcgttttgaactgattccgcagggtaaaaccctgaaacatattcaagaacagggcttcatcgaagaggataaagcacgtaacgatcactacaaagaactgaaaccgattatcgaccgcatctataaaacctatgcagatcagtgtctgcagctggttcagctggattgggaaaatctgagcgcagcaattgatagttatcgcaaagaaaaaaccgaagaaacccgtaatgcactgattgaagaacaggcaacctatcgtaatgccatccatgattatttcattggtcgtaccgataatctgaccgatgcaattaacaaacgtcacgccgaaatctataaaggcctgtttaaagccgaactgtttaatggcaaagttctgaaacagctgggcaccgttaccaccaccgaacatgaaaatgcactgctgcgtagctttgataaattcaccacctatttcagcggcttttatgagaatcgcaaaaacgtgtttagcgcagaagatattagcaccgcaattccgcatcgtattgtgcaggataatttcccgaaattcaaagagaactgccacatttttacccgtctgattaccgcagttccgagcctgcgtgaacattttgaaaacgttaaaaaagccatcggcatctttgttagcaccagcattgaagaagtttttagcttcccgttttacaatcagctgctgacccagacccagattgatctgtataaccaactgctgggtggtattagccgtgaagcaggcaccgaaaaaatcaaaggtctgaatgaagtgctgaatctggccattcagaaaaatgatgaaaccgcacatattattgcaagcctgccgcatcgttttattccgctgttcaaacaaattctgagcgatcgtaataccctgagctttattctggaagaattcaaatccgatgaagaggtgattcagagcttttgcaaatacaaaacgctgctgcgcaatgaaaatgttctggaaactgccgaagcactgtttaacgaactgaatagcattgatctgacccacatctttatcagccacaaaaaactggaaaccatttcaagcgcactgtgtgatcattgggataccctgcgtaatgccctgtatgaacgtcgtattagcgaactgaccggtaaaattaccaaaagcgcgaaagaaaaagttcagcgcagtctgaaacatgaggatattaatctgcaagagattattagcgcagccggtaaagaactgtcagaagcatttaaacagaaaaccagcgaaattctgtcacatgcacatgcagcactggatcagccgctgccgaccaccctgaaaaaacaagaagaaaaagaaatcctgaaaagccagctggatagcctgctgggtctgtatcatctgctggactggtttgcagttgatgaaagcaatgaagttgatccggaatttagcgcacgtctgaccggcattaaactggaaatggaaccgagcctgagcttttataacaaagcccgtaattatgccaccaaaaaaccgtatagcgtcgaaaaattcaaactgaactttcagatgccgaccctggcaagcggttgggatgttaataaagaaaaaaacaacggtgccatcctgttcgtgaaaaatggcctgtattatctgggtattatgccgaaacagaaaggtcgttataaagcgctgagctttgaaccgacggaaaaaaccagtgaaggttttgataaaatgtactacgactattttccggatgcagccaaaatgattccgaaatgtagcacccagctgaaagcagttaccgcacattttcagacccataccaccccgattctgctgagcaataactttattgaaccgctggaaatcaccaaagagatctacgatctgaataacccggaaaaagagccgaaaaaattccagaccgcatatgcaaaaaaaaccggtgatcagaaaggttatcgtgaagcgctgtgtaaatggattgatttcacccgtgattttctgagcaaatacaccaaaaccaccagtatcgatctgagcagcctgcgtccgagcagccagtataaagatctgggcgaatattatgcagaactgaatccgctgctgtatcatattagctttcagcgtattgccgagaaagaaatcatggacgcagttgaaaccggtaaactgtacctgttccagatctacaataaagattttgccaaaggccatcatggcaaaccgaatctgcataccctgtattggaccggtctgtttagccctgaaaatctggcaaaaacctcgattaaactgaatggtcaggcggaactgttttatcgtccgaaaagccgtatgaaacgtatggcacatcgtctgggtgaaaaaatgctgaacaaaaaactgaaagaccagaaaaccccgatcccggatacactgtatcaagaactgtatgattatgtgaaccatcgtctgagccatgatctgagtgatgaagcacgtgccctgctgccgaatgttattaccaaagaagttagccacgagatcattaaagatcgtcgttttaccagcgacaaattcttttttcatgtgccgattaccctgaattatcaggcagcaaatagcccgagcaaatttaaccagcgtgttaatgcatatctgaaagaacatccagaaacgccgattattggtattgatcgtggtgaacgtaacctgatttatatcaccgttattgatagcaccggcaaaatcctggaacagcgtagcctgaataccattcagcagtttgattaccagaaaaaactggataatcgcgagaaagaacgtgttgcagcacgtcaggcatggtcagttgttggtacaattaaagacctgaaacagggttatctgagccaggttattcatgaaattgtggatctgatgattcactatcaggccgttgttgtgctggaaaacctgaattttggctttaaaagcaaacgtaccggcattgcagaaaaagcagtttatcagcagttcgagaaaatgctgattgacaaactgaattgcctggtgctgaaagattatccggctgaaaaagttggtggtgttctgaatccgtatcagctgaccgatcagtttaccagctttgcaaaaatgggcacccagagcggatttctgttttatgttccggcaccgtatacgagcaaaattgatccgctgaccggttttgttgatccgtttgtttggaaaaccatcaaaaaccatgaaagccgcaaacattttctggaaggtttcgattttctgcattacgacgttaaaacgggtgatttcatcctgcactttaaaatgaatcgcaatctgagttttcagcgtggcctgcctggttttatgcctgcatgggatattgtgtttgagaaaaacgaaacacagttcgatgcaaaaggcaccccgtttattgcaggtaaacgtattgttccggtgattgaaaatcatcgtttcaccggtcgttatcgcgatctgtatccggcaaatgaactgatcgcactgctggaagagaaaggtattgtttttcgtgatggctcaaacattctgccgaaactgctggaaaatgatgatagccatgcaattgataccatggttgcactgattcgtagcgttctgcagatgcgtaatagcaatgcagcaaccggtgaagattacattaatagtccggttcgtgatctgaatggtgtttgttttgatagccgttttcagaatccggaatggccgatggatgcagatgcaaatggtgcatatcatattgcactgaaaggacagctgctgctgaaccacctgaaagaaagcaaagatctgaaactgcaaaacggcattagcaatcaggattggctggcatatatccaagaactgcgtaacggtcgtaaacgtaccgcagatggtagcgaatttgaaagcccgaaaaaaaagcgtaaggtggaaggtggtagcggtggttcaggtggtagtggcggtagtggtggctcagggggttctggtggctctggtggtagcctcgagcaccaccaccaccaccactga

SEQ ID NO: 16 - DNA, 4167 bp, Artificial Sequence
  SYNTHETIC
atgacccagtttgaaggtttcaccaatctgtatcaggttagcaaaaccctgcgttttgaactgattccgcagggtaaaaccctgaaacatattcaagaacagggcttcatcgaagaggataaagcacgtaacgatcactacaaagaactgaaaccgattatcgaccgcatctataaaacctatgcagatcagtgtctgcagctggttcagctggattgggaaaatctgagcgcagcaattgatagttatcgcaaagaaaaaaccgaagaaacccgtaatgcactgattgaagaacaggcaacctatcgtaatgccatccatgattatttcattggtcgtaccgataatctgaccgatgcaattaacaaacgtcacgccgaaatctataaaggcctgtttaaagccgaactgtttaatggcaaagttctgaaacagctgggcaccgttaccaccaccgaacatgaaaatgcactgctgcgtagctttgataaattcaccacctatttcagcggcttttatgagaatcgcaaaaacgtgtttagcgcagaagatattagcaccgcaattccgcatcgtattgtgcaggataatttcccgaaattcaaagagaactgccacatttttacccgtctgattaccgcagttccgagcctgcgtgaacattttgaaaacgttaaaaaagccatcggcatctttgttagcaccagcattgaagaagtttttagcttcccgttttacaatcagctgctgacccagacccagattgatctgtataaccaactgctgggtggtattagccgtgaagcaggcaccgaaaaaatcaaaggtctgaatgaagtgctgaatctggccattcagaaaaatgatgaaaccgcacatattattgcaagcctgccgcatcgttttattccgctgttcaaacaaattctgagcgatcgtaataccctgagctttattctggaagaattcaaatccgatgaagaggtgattcagagcttttgcaaatacaaaacgctgctgcgcaatgaaaatgttctggaaactgccgaagcactgtttaacgaactgaatagcattgatctgacccacatctttatcagccacaaaaaactggaaaccatttcaagcgcactgtgtgatcattgggataccctgcgtaatgccctgtatgaacgtcgtattagcgaactgaccggtaaaattaccaaaagcgcgaaagaaaaagttcagcgcagtctgaaacatgaggatattaatctgcaagagattattagcgcagccggtaaagaactgtcagaagcatttaaacagaaaaccagcgaaattctgtcacatgcacatgcagcactggatcagccgctgccgaccaccctgaaaaaacaagaagaaaaagaaatcctgaaaagccagctggatagcctgctgggtctgtatcatctgctggactggtttgcagttgatgaaagcaatgaagttgatccggaatttagcgcacgtctgaccggcattaaactggaaatggaaccgagcctgagcttttataacaaagcccgtaattatgccaccaaaaaaccgtatagcgtcgaaaaattcaaactgaactttcagatgccgaccctggcaagcggttgggatgttaataaagaaaaaaacaacggtgccatcctgttcgtgaaaaatggcctgtattatctgggtattatgccgaaacagaaaggtcgttataaagcgctgagctttgaaccgacggaaaaaaccagtgaaggttttgataaaatgtactacgactattttccggatgcagccaaaatgattccgaaatgtagcacccagctgaaagcagttaccgcacattttcagacccataccaccccgattctgctgagcaataactttattgaaccgctggaaatcaccaaagagatctacgatctgaataacccggaaaaagagccgaaaaaattccagaccgcatatgcaaaaaaaaccggtgatcagaaaggttatcgtgaagcgctgtgtaaatggattgatttcacccgtgattttctgagcaaatacaccaaaaccaccagtatcgatctgagcagcctgcgtccgagcagccagtataaagatctgggcgaatattatgcagaactgaatccgctgctgtatcatattagctttcagcgtattgccgagaaagaaatcatggacgcagttgaaaccggtaaactgtacctgttccagatctacaataaagattttgccaaaggccatcatggcaaaccgaatctgcataccctgtattggaccggtctgtttagccctgaaaatctggcaaaaacctcgattaaactgaatggtcaggcggaactgttttatcgtccgaaaagccgtatgaaacgtatggcacatcgtctgggtgaaaaaatgctgaacaaaaaactgaaagaccagaaaaccccgatcccggatacactgtatcaagaactgtatgattatgtgaaccatcgtctgagccatgatctgagtgatgaagcacgtgccctgctgccgaatgttattaccaaagaagttagccacgagatcattaaagatcgtcgttttaccagcgacaaattcttttttcatgtgccgattaccctgaattatcaggcagcaaatagcccgagcaaatttaaccagcgtgttaatgcatatctgaaagaacatccagaaacgccgattattggtattgatcgtggtgaacgtaacctgatttatatcaccgttattgatagcaccggcaaaatcctggaacagcgtagcctgaataccattcagcagtttgattaccagaaaaaactggataatcgcgagaaagaacgtgttgcagcacgtcaggcatggtcagttgttggtacaattaaagacctgaaacagggttatctgagccaggttattcatgaaattgtggatctgatgattcactatcaggccgttgttgtgctggaaaacctgaattttggctttaaaagcaaacgtaccggcattgcagaaaaagcagtttatcagcagttcgagaaaatgctgattgacaaactgaattgcctggtgctgaaagattatccggctgaaaaagttggtggtgttctgaatccgtatcagctgaccgatcagtttaccagctttgcaaaaatgggcacccagagcggatttctgttttatgttccggcaccgtatacgagcaaaattgatccgctgaccggttttgttgatccgtttgtttggaaaaccatcaaaaaccatgaaagccgcaaacattttctggaaggtttcgattttctgcattacgacgttaaaacgggtgatttcatcctgcactttaaaatgaatcgcaatctgagttttcagcgtggcctgcctggttttatgcctgcatgggatattgtgtttgagaaaaacgaaacacagttcgatgcaaaaggcaccccgtttattgcaggtaaacgtattgttccggtgattgaaaatcatcgtttcaccggtcgttatcgcgatctgtatccggcaaatgaactgatcgcactgctggaagagaaaggtattgtttttcgtgatggctcaaacattctgccgaaactgctggaaaatgatgatagccatgcaattgataccatggttgcactgattcgtagcgttctgcagatgcgtaatagcaatgcagcaaccggtgaagattacattaatagtccggttcgtgatctgaatggtgtttgttttgatagccgttttcagaatccggaatggccgatggatgcagatgcaaatggtgcatatcatattgcactgaaaggacagctgctgctgaaccacctgaaagaaagcaaagatctgaaactgcaaaacggcattagcaatcaggattggctggcatatatccaagaactgcgtaacggtcgtagcagtgatgatgaagcaaccgcagatagccagcatgcagcaccgcctaaaaagaaacgtaaagttggtggtagcggcggtagtaaacgtaccgcagatggtagcgaatttgaaagcccgaaaaaaaagcgtaaggtggaaggtggtagcggtggttcaggtggtagtggcggtagtggtggctcagggggttctggtggctctggtggtagcctcgagcaccaccaccaccaccactga

SEQ ID NO: 17 - DNA, 4149 bp, Artificial Sequence
  SYNTHETIC
atgacccagtttgaaggtttcaccaatctgtatcaggttagcaaaaccctgcgttttgaactgattccgcagggtaaaaccctgaaacatattcaagaacagggcttcatcgaagaggataaagcacgtaacgatcactacaaagaactgaaaccgattatcgaccgcatctataaaacctatgcagatcagtgtctgcagctggttcagctggattgggaaaatctgagcgcagcaattgatagttatcgcaaagaaaaaaccgaagaaacccgtaatgcactgattgaagaacaggcaacctatcgtaatgccatccatgattatttcattggtcgtaccgataatctgaccgatgcaattaacaaacgtcacgccgaaatctataaaggcctgtttaaagccgaactgtttaatggcaaagttctgaaacagctgggcaccgttaccaccaccgaacatgaaaatgcactgctgcgtagctttgataaattcaccacctatttcagcggcttttatgagaatcgcaaaaacgtgtttagcgcagaagatattagcaccgcaattccgcatcgtattgtgcaggataatttcccgaaattcaaagagaactgccacatttttacccgtctgattaccgcagttccgagcctgcgtgaacattttgaaaacgttaaaaaagccatcggcatctttgttagcaccagcattgaagaagtttttagcttcccgttttacaatcagctgctgacccagacccagattgatctgtataaccaactgctgggtggtattagccgtgaagcaggcaccgaaaaaatcaaaggtctgaatgaagtgctgaatctggccattcagaaaaatgatgaaaccgcacatattattgcaagcctgccgcatcgttttattccgctgttcaaacaaattctgagcgatcgtaataccctgagctttattctggaagaattcaaatccgatgaagaggtgattcagagcttttgcaaatacaaaacgctgctgcgcaatgaaaatgttctggaaactgccgaagcactgtttaacgaactgaatagcattgatctgacccacatctttatcagccacaaaaaactggaaaccatttcaagcgcactgtgtgatcattgggataccctgcgtaatgccctgtatgaacgtcgtattagcgaactgaccggtaaaattaccaaaagcgcgaaagaaaaagttcagcgcagtctgaaacatgaggatattaatctgcaagagattattagcgcagccggtaaagaactgtcagaagcatttaaacagaaaaccagcgaaattctgtcacatgcacatgcagcactggatcagccgctgccgaccaccctgaaaaaacaagaagaaaaagaaatcctgaaaagccagctggatagcctgctgggtctgtatcatctgctggactggtttgcagttgatgaaagcaatgaagttgatccggaatttagcgcacgtctgaccggcattaaactggaaatggaaccgagcctgagcttttataacaaagcccgtaattatgccaccaaaaaaccgtatagcgtcgaaaaattcaaactgaactttcagatgccgaccctggcaagcggttgggatgttaataaagaaaaaaacaacggtgccatcctgttcgtgaaaaatggcctgtattatctgggtattatgccgaaacagaaaggtcgttataaagcgctgagctttgaaccgacggaaaaaaccagtgaaggttttgataaaatgtactacgactattttccggatgcagccaaaatgattccgaaatgtagcacccagctgaaagcagttaccgcacattttcagacccataccaccccgattctgctgagcaataactttattgaaccgctggaaatcaccaaagagatctacgatctgaataacccggaaaaagagccgaaaaaattccagaccgcatatgcaaaaaaaaccggtgatcagaaaggttatcgtgaagcgctgtgtaaatggattgatttcacccgtgattttctgagcaaatacaccaaaaccaccagtatcgatctgagcagcctgcgtccgagcagccagtataaagatctgggcgaatattatgcagaactgaatccgctgctgtatcatattagctttcagcgtattgccgagaaagaaatcatggacgcagttgaaaccggtaaactgtacctgttccagatctacaataaagattttgccaaaggccatcatggcaaaccgaatctgcataccctgtattggaccggtctgtttagccctgaaaatctggcaaaaacctcgattaaactgaatggtcaggcggaactgttttatcgtccgaaaagccgtatgaaacgtatggcacatcgtctgggtgaaaaaatgctgaacaaaaaactgaaagaccagaaaaccccgatcccggatacactgtatcaagaactgtatgattatgtgaaccatcgtctgagccatgatctgagtgatgaagcacgtgccctgctgccgaatgttattaccaaagaagttagccacgagatcattaaagatcgtcgttttaccagcgacaaattcttttttcatgtgccgattaccctgaattatcaggcagcaaatagcccgagcaaatttaaccagcgtgttaatgcatatctgaaagaacatccagaaacgccgattattggtattgatcgtggtgaacgtaacctgatttatatcaccgttattgatagcaccggcaaaatcctggaacagcgtagcctgaataccattcagcagtttgattaccagaaaaaactggataatcgcgagaaagaacgtgttgcagcacgtcaggcatggtcagttgttggtacaattaaagacctgaaacagggttatctgagccaggttattcatgaaattgtggatctgatgattcactatcaggccgttgttgtgctggaaaacctgaattttggctttaaaagcaaacgtaccggcattgcagaaaaagcagtttatcagcagttcgagaaaatgctgattgacaaactgaattgcctggtgctgaaagattatccggctgaaaaagttggtggtgttctgaatccgtatcagctgaccgatcagtttaccagctttgcaaaaatgggcacccagagcggatttctgttttatgttccggcaccgtatacgagcaaaattgatccgctgaccggttttgttgatccgtttgtttggaaaaccatcaaaaaccatgaaagccgcaaacattttctggaaggtttcgattttctgcattacgacgttaaaacgggtgatttcatcctgcactttaaaatgaatcgcaatctgagttttcagcgtggcctgcctggttttatgcctgcatgggatattgtgtttgagaaaaacgaaacacagttcgatgcaaaaggcaccccgtttattgcaggtaaacgtattgttccggtgattgaaaatcatcgtttcaccggtcgttatcgcgatctgtatccggcaaatgaactgatcgcactgctggaagagaaaggtattgtttttcgtgatggctcaaacattctgccgaaactgctggaaaatgatgatagccatgcaattgataccatggttgcactgattcgtagcgttctgcagatgcgtaatagcaatgcagcaaccggtgaagattacattaatagtccggttcgtgatctgaatggtgtttgttttgatagccgttttcagaatccggaatggccgatggatgcagatgcaaatggtgcatatcatattgcactgaaaggacagctgctgctgaaccacctgaaagaaagcaaagatctgaaactgcaaaacggcattagcaatcaggattggctggcatatatccaagaactgcgtaacggtcgtaaacgtccggcagcaaccaaaaaagcaggtcaggcaaaaaagaaaaaaggtggtagcggcggtagtaaacgtaccgcagatggtagcgaatttgaaagcccgaaaaaaaagcgtaaggtggaaggtggtagcggtggttcaggtggtagtggcggtagtggtggctcagggggttctggtggctctggtggtagcctcgagcaccaccaccaccaccactga

SEQ ID NO: 18 - protein, 1384 aa, Artificial Sequence
  SYNTHETIC
MGSSSSGLVPRGSHMASMTGGQQMGRDPGKPIPNPLLGLDSTAPKKKRKVGIHGVPAATQFEGFTNLYQVSKTLRFELIPQGKTLKHIQEQGFIEEDKARNDHYKELKPIIDRIYKTYADQCLQLVQLDWENLSAAIDSYRKEKTEETRNALIEEQATYRNAIHDYFIGRTDNLTDAINKRHAEIYKGLFKAELFNGKVLKQLGTVTTTEHENALLRSFDKFTTYFSGFYENRKNVFSAEDISTAIPHRIVQDNFPKFKENCHIFTRLITAVPSLREHFENVKKAIGIFVSTSIEEVFSFPFYNQLLTQTQIDLYNQLLGGISREAGTEKIKGLNEVLNLAIQKNDETAHIIASLPHRFIPLFKQILSDRNTLSFILEEFKSDEEVIQSFCKYKTLLRNENVLETAEALFNELNSIDLTHIFISHKKLETISSALCDHWDTLRNALYERRISELTGKITKSAKEKVQRSLKHEDINLQEIISAAGKELSEAFKQKTSEILSHAHAALDQPLPTTLKKQEEKEILKSQLDSLLGLYHLLDWFAVDESNEVDPEFSARLTGIKLEMEPSLSFYNKARNYATKKPYSVEKFKLNFQMPTLASGWDVNKEKNNGAILFVKNGLYYLGIMPKQKGRYKALSFEPTEKTSEGFDKMYYDYFPDAAKMIPKCSTQLKAVTAHFQTHTTPILLSNNFIEPLEITKEIYDLNNPEKEPKKFQTAYAKKTGDQKGYREALCKWIDFTRDFLSKYTKTTSIDLSSLRPSSQYKDLGEYYAELNPLLYHISFQRIAEKEIMDAVETGKLYLFQIYNKDFAKGHHGKPNLHTLYWTGLFSPENLAKTSIKLNGQAELFYRPKSRMKRMAHRLGEKMLNKKLKDQKTPIPDTLYQELYDYVNHRLSHDLSDEARALLPNVITKEVSHEIIKDRRFTSDKFFFHVPITLNYQAANSPSKFNQRVNAYLKEHPETPIIGIDRGERNLIYITVIDSTGKILEQRSLNTIQQFDYQKKLDNREKERVAARQAWSVVGTIKDLKQGYLSQVIHEIVDLMIHYQAVVVLENLNFGFKSKRTGIAEKAVYQQFEKMLIDKLNCLVLKDYPAEKVGGVLNPYQLTDQFTSFAKMGTQSGFLFYVPAPYTSKIDPLTGFVDPFVWKTIKNHESRKHFLEGFDFLHYDVKTGDFILHFKMNRNLSFQRGLPGFMPAWDIVFEKNETQFDAKGTPFIAGKRIVPVIENHRFTGRYRDLYPANELIALLEEKGIVFRDGSNILPKLLENDDSHAIDTMVALIRSVLQMRNSNAATGEDYINSPVRDLNGVCFDSRFQNPEWPMDADANGAYHIALKGQLLLNHLKESKDLKLQNGISNQDWLAYIQELRNPKKKRKVKLAAALEHHHHHH

SEQ ID NO: 19 - protein, 1370 aa, Artificial Sequence
  SYNTHETIC
MGSSSSGLVPRGSHMASMTGGQQMGRDPAPKKKRKVGIHGVPAATQFEGFTNLYQVSKTLRFELIPQGKTLKHIQEQGFIEEDKARNDHYKELKPIIDRIYKTYADQCLQLVQLDWENLSAAIDSYRKEKTEETRNALIEEQATYRNAIHDYFIGRTDNLTDAINKRHAEIYKGLFKAELFNGKVLKQLGTVTTTEHENALLRSFDKFTTYFSGFYENRKNVFSAEDISTAIPHRIVQDNFPKFKENCHIFTRLITAVPSLREHFENVKKAIGIFVSTSIEEVFSFPFYNQLLTQTQIDLYNQLLGGISREAGTEKIKGLNEVLNLAIQKNDETAHIIASLPHRFIPLFKQILSDRNTLSFILEEFKSDEEVIQSFCKYKTLLRNENVLETAEALFNELNSIDLTHIFISHKKLETISSALCDHWDTLRNALYERRISELTGKITKSAKEKVQRSLKHEDINLQEIISAAGKELSEAFKQKTSEILSHAHAALDQPLPTTLKKQEEKEILKSQLDSLLGLYHLLDWFAVDESNEVDPEFSARLTGIKLEMEPSLSFYNKARNYATKKPYSVEKFKLNFQMPTLASGWDVNKEKNNGAILFVKNGLYYLGIMPKQKGRYKALSFEPTEKTSEGFDKMYYDYFPDAAKMIPKCSTQLKAVTAHFQTHTTPILLSNNFIEPLEITKEIYDLNNPEKEPKKFQTAYAKKTGDQKGYREALCKWIDFTRDFLSKYTKTTSIDLSSLRPSSQYKDLGEYYAELNPLLYHISFQRIAEKEIMDAVETGKLYLFQIYNKDFAKGHHGKPNLHTLYWTGLFSPENLAKTSIKLNGQAELFYRPKSRMKRMAHRLGEKMLNKKLKDQKTPIPDTLYQELYDYVNHRLSHDLSDEARALLPNVITKEVSHEIIKDRRFTSDKFFFHVPITLNYQAANSPSKFNQRVNAYLKEHPETPIIGIDRGERNLIYITVIDSTGKILEQRSLNTIQQFDYQKKLDNREKERVAARQAWSVVGTIKDLKQGYLSQVIHEIVDLMIHYQAVVVLENLNFGFKSKRTGIAEKAVYQQFEKMLIDKLNCLVLKDYPAEKVGGVLNPYQLTDQFTSFAKMGTQSGFLFYVPAPYTSKIDPLTGFVDPFVWKTIKNHESRKHFLEGFDFLHYDVKTGDFILHFKMNRNLSFQRGLPGFMPAWDIVFEKNETQFDAKGTPFIAGKRIVPVIENHRFTGRYRDLYPANELIALLEEKGIVFRDGSNILPKLLENDDSHAIDTMVALIRSVLQMRNSNAATGEDYINSPVRDLNGVCFDSRFQNPEWPMDADANGAYHIALKGQLLLNHLKESKDLKLQNGISNQDWLAYIQELRNPKKKRKVKLAAALEHHHHHH

SEQ ID NO: 20 - protein, 1337 aa, Artificial Sequence
  SYNTHETIC
MPKKKRKVGIHGVPAATQFEGFTNLYQVSKTLRFELIPQGKTLKHIQEQGFIEEDKARNDHYKELKPIIDRIYKTYADQCLQLVQLDWENLSAAIDSYRKEKTEETRNALIEEQATYRNAIHDYFIGRTDNLTDAINKRHAEIYKGLFKAELFNGKVLKQLGTVTTTEHENALLRSFDKFTTYFSGFYENRKNVFSAEDISTAIPHRIVQDNFPKFKENCHIFTRLITAVPSLREHFENVKKAIGIFVSTSIEEVFSFPFYNQLLTQTQIDLYNQLLGGISREAGTEKIKGLNEVLNLAIQKNDETAHIIASLPHRFIPLFKQILSDRNTLSFILEEFKSDEEVIQSFCKYKTLLRNENVLETAEALFNELNSIDLTHIFISHKKLETISSALCDHWDTLRNALYERRISELTGKITKSAKEKVQRSLKHEDINLQEIISAAGKELSEAFKQKTSEILSHAHAALDQPLPTTLKKQEEKEILKSQLDSLLGLYHLLDWFAVDESNEVDPEFSARLTGIKLEMEPSLSFYNKARNYATKKPYSVEKFKLNFQMPTLASGWDVNKEKNNGAILFVKNGLYYLGIMPKQKGRYKALSFEPTEKTSEGFDKMYYDYFPDAAKMIPKCSTQLKAVTAHFQTHTTPILLSNNFIEPLEITKEIYDLNNPEKEPKKFQTAYAKKTGDQKGYREALCKWIDFTRDFLSKYTKTTSIDLSSLRPSSQYKDLGEYYAELNPLLYHISFQRIAEKEIMDAVETGKLYLFQIYNKDFAKGHHGKPNLHTLYWTGLFSPENLAKTSIKLNGQAELFYRPKSRMKRMAHRLGEKMLNKKLKDQKTPIPDTLYQELYDYVNHRLSHDLSDEARALLPNVITKEVSHEIIKDRRFTSDKFFFHVPITLNYQAANSPSKFNQRVNAYLKEHPETPIIGIDRGERNLIYITVIDSTGKILEQRSLNTIQQFDYQKKLDNREKERVAARQAWSVVGTIKDLKQGYLSQVIHEIVDLMIHYQAVVVLENLNFGFKSKRTGIAEKAVYQQFEKMLIDKLNCLVLKDYPAEKVGGVLNPYQLTDQFTSFAKMGTQSGFLFYVPAPYTSKIDPLTGFVDPFVWKTIKNHESRKHFLEGFDFLHYDVKTGDFILHFKMNRNLSFQRGLPGFMPAWDIVFEKNETQFDAKGTPFIAGKRIVPVIENHRFTGRYRDLYPANELIALLEEKGIVFRDGSNILPKLLENDDSHAIDTMVALIRSVLQMRNSNAATGEDYINSPVRDLNGVCFDSRFQNPEWPMDADANGAYHIALKGQLLLNHLKESKDLKLQNGISNQDWLAYIQELRNPKKKRKVLEHHHHHH

SEQ ID NO: 21 - protein, 1322 aa, Artificial Sequence
  SYNTHETIC
MTQFEGFTNLYQVSKTLRFELIPQGKTLKHIQEQGFIEEDKARNDHYKELKPIIDRIYKTYADQCLQLVQLDWENLSAAIDSYRKEKTEETRNALIEEQATYRNAIHDYFIGRTDNLTDAINKRHAEIYKGLFKAELFNGKVLKQLGTVTTTEHENALLRSFDKFTTYFSGFYENRKNVFSAEDISTAIPHRIVQDNFPKFKENCHIFTRLITAVPSLREHFENVKKAIGIFVSTSIEEVFSFPFYNQLLTQTQIDLYNQLLGGISREAGTEKIKGLNEVLNLAIQKNDETAHIIASLPHRFIPLFKQILSDRNTLSFILEEFKSDEEVIQSFCKYKTLLRNENVLETAEALFNELNSIDLTHIFISHKKLETISSALCDHWDTLRNALYERRISELTGKITKSAKEKVQRSLKHEDINLQEIISAAGKELSEAFKQKTSEILSHAHAALDQPLPTTLKKQEEKEILKSQLDSLLGLYHLLDWFAVDESNEVDPEFSARLTGIKLEMEPSLSFYNKARNYATKKPYSVEKFKLNFQMPTLASGWDVNKEKNNGAILFVKNGLYYLGIMPKQKGRYKALSFEPTEKTSEGFDKMYYDYFPDAAKMIPKCSTQLKAVTAHFQTHTTPILLSNNFIEPLEITKEIYDLNNPEKEPKKFQTAYAKKTGDQKGYREALCKWIDFTRDFLSKYTKTTSIDLSSLRPSSQYKDLGEYYAELNPLLYHISFQRIAEKEIMDAVETGKLYLFQIYNKDFAKGHHGKPNLHTLYWTGLFSPENLAKTSIKLNGQAELFYRPKSRMKRMAHRLGEKMLNKKLKDQKTPIPDTLYQELYDYVNHRLSHDLSDEARALLPNVITKEVSHEIIKDRRFTSDKFFFHVPITLNYQAANSPSKFNQRVNAYLKEHPETPIIGIDRGERNLIYITVIDSTGKILEQRSLNTIQQFDYQKKLDNREKERVAARQAWSVVGTIKDLKQGYLSQVIHEIVDLMIHYQAVVVLENLNFGFKSKRTGIAEKAVYQQFEKMLIDKLNCLVLKDYPAEKVGGVLNPYQLTDQFTSFAKMGTQSGFLFYVPAPYTSKIDPLTGFVDPFVWKTIKNHESRKHFLEGFDFLHYDVKTGDFILHFKMNRNLSFQRGLPGFMPAWDIVFEKNETQFDAKGTPFIAGKRIVPVIENHRFTGRYRDLYPANELIALLEEKGIVFRDGSNILPKLLENDDSHAIDTMVALIRSVLQMRNSNAATGEDYINSPVRDLNGVCFDSRFQNPEWPMDADANGAYHIALKGQLLLNHLKESKDLKLQNGISNQDWLAYIQELRNPKKKRKVLEHHHHHH

SEQ ID NO: 22 - protein, 1396 aa, Artificial Sequence
  SYNTHETIC
MGSSHHHHHHSSGLVPRGSHMASMTGGQQMGRDPTQFEGFTNLYQVSKTLRFELIPQGKTLKHIQEQGFIEEDKARNDHYKELKPIIDRIYKTYADQCLQLVQLDWENLSAAIDSYRKEKTEETRNALIEEQATYRNAIHDYFIGRTDNLTDAINKRHAEIYKGLFKAELFNGKVLKQLGTVTTTEHENALLRSFDKFTTYFSGFYENRKNVFSAEDISTAIPHRIVQDNFPKFKENCHIFTRLITAVPSLREHFENVKKAIGIFVSTSIEEVFSFPFYNQLLTQTQIDLYNQLLGGISREAGTEKIKGLNEVLNLAIQKNDETAHIIASLPHRFIPLFKQILSDRNTLSFILEEFKSDEEVIQSFCKYKTLLRNENVLETAEALFNELNSIDLTHIFISHKKLETISSALCDHWDTLRNALYERRISELTGKITKSAKEKVQRSLKHEDINLQEIISAAGKELSEAFKQKTSEILSHAHAALDQPLPTTLKKQEEKEILKSQLDSLLGLYHLLDWFAVDESNEVDPEFSARLTGIKLEMEPSLSFYNKARNYATKKPYSVEKFKLNFQMPTLASGWDVNKEKNNGAILFVKNGLYYLGIMPKQKGRYKALSFEPTEKTSEGFDKMYYDYFPDAAKMIPKCSTQLKAVTAHFQTHTTPILLSNNFIEPLEITKEIYDLNNPEKEPKKFQTAYAKKTGDQKGYREALCKWIDFTRDFLSKYTKTTSIDLSSLRPSSQYKDLGEYYAELNPLLYHISFQRIAEKEIMDAVETGKLYLFQIYNKDFAKGHHGKPNLHTLYWTGLFSPENLAKTSIKLNGQAELFYRPKSRMKRMAHRLGEKMLNKKLKDQKTPIPDTLYQELYDYVNHRLSHDLSDEARALLPNVITKEVSHEIIKDRRFTSDKFFFHVPITLNYQAANSPSKFNQRVNAYLKEHPETPIIGIDRGERNLIYITVIDSTGKILEQRSLNTIQQFDYQKKLDNREKERVAARQAWSVVGTIKDLKQGYLSQVIHEIVDLMIHYQAVVVLENLNFGFKSKRTGIAEKAVYQQFEKMLIDKLNCLVLKDYPAEKVGGVLNPYQLTDQFTSFAKMGTQSGFLFYVPAPYTSKIDPLTGFVDPFVWKTIKNHESRKHFLEGFDFLHYDVKTGDFILHFKMNRNLSFQRGLPGFMPAWDIVFEKNETQFDAKGTPFIAGKRIVPVIENHRFTGRYRDLYPANELIALLEEKGIVFRDGSNILPKLLENDDSHAIDTMVALIRSVLQMRNSNAATGEDYINSPVRDLNGVCFDSRFQNPEWPMDADANGAYHIALKGQLLLNHLKESKDLKLQNGISNQDWLAYIQELRNGRSSDDEATADSQHAAPPKKKRKVGGSGGSGGSGGSGGSGGSGGSGGSLEHHHHHH

SEQ ID NO: 23 - protein, 1363 aa, Artificial Sequence
  SYNTHETIC
MTQFEGFTNLYQVSKTLRFELIPQGKTLKHIQEQGFIEEDKARNDHYKELKPIIDRIYKTYADQCLQLVQLDWENLSAAIDSYRKEKTEETRNALIEEQATYRNAIHDYFIGRTDNLTDAINKRHAEIYKGLFKAELFNGKVLKQLGTVTTTEHENALLRSFDKFTTYFSGFYENRKNVFSAEDISTAIPHRIVQDNFPKFKENCHIFTRLITAVPSLREHFENVKKAIGIFVSTSIEEVFSFPFYNQLLTQTQIDLYNQLLGGISREAGTEKIKGLNEVLNLAIQKNDETAHIIASLPHRFIPLFKQILSDRNTLSFILEEFKSDEEVIQSFCKYKTLLRNENVLETAEALFNELNSIDLTHIFISHKKLETISSALCDHWDTLRNALYERRISELTGKITKSAKEKVQRSLKHEDINLQEIISAAGKELSEAFKQKTSEILSHAHAALDQPLPTTLKKQEEKEILKSQLDSLLGLYHLLDWFAVDESNEVDPEFSARLTGIKLEMEPSLSFYNKARNYATKKPYSVEKFKLNFQMPTLASGWDVNKEKNNGAILFVKNGLYYLGIMPKQKGRYKALSFEPTEKTSEGFDKMYYDYFPDAAKMIPKCSTQLKAVTAHFQTHTTPILLSNNFIEPLEITKEIYDLNNPEKEPKKFQTAYAKKTGDQKGYREALCKWIDFTRDFLSKYTKTTSIDLSSLRPSSQYKDLGEYYAELNPLLYHISFQRIAEKEIMDAVETGKLYLFQIYNKDFAKGHHGKPNLHTLYWTGLFSPENLAKTSIKLNGQAELFYRPKSRMKRMAHRLGEKMLNKKLKDQKTPIPDTLYQELYDYVNHRLSHDLSDEARALLPNVITKEVSHEIIKDRRFTSDKFFFHVPITLNYQAANSPSKFNQRVNAYLKEHPETPIIGIDRGERNLIYITVIDSTGKILEQRSLNTIQQFDYQKKLDNREKERVAARQAWSVVGTIKDLKQGYLSQVIHEIVDLMIHYQAVVVLENLNFGFKSKRTGIAEKAVYQQFEKMLIDKLNCLVLKDYPAEKVGGVLNPYQLTDQFTSFAKMGTQSGFLFYVPAPYTSKIDPLTGFVDPFVWKTIKNHESRKHFLEGFDFLHYDVKTGDFILHFKMNRNLSFQRGLPGFMPAWDIVFEKNETQFDAKGTPFIAGKRIVPVIENHRFTGRYRDLYPANELIALLEEKGIVFRDGSNILPKLLENDDSHAIDTMVALIRSVLQMRNSNAATGEDYINSPVRDLNGVCFDSRFQNPEWPMDADANGAYHIALKGQLLLNHLKESKDLKLQNGISNQDWLAYIQELRNGRSSDDEATADSQHAAPPKKKRKVGGSGGSGGSGGSGGSGGSGGSGGSLEHHHHHH

SEQ ID NO: 24 - protein, 1390 aa, Artificial Sequence
  SYNTHETIC
MGSSSSGLVPRGSHMASMTGGQQMGRDPTQFEGFTNLYQVSKTLRFELIPQGKTLKHIQEQGFIEEDKARNDHYKELKPIIDRIYKTYADQCLQLVQLDWENLSAAIDSYRKEKTEETRNALIEEQATYRNAIHDYFIGRTDNLTDAINKRHAEIYKGLFKAELFNGKVLKQLGTVTTTEHENALLRSFDKFTTYFSGFYENRKNVFSAEDISTAIPHRIVQDNFPKFKENCHIFTRLITAVPSLREHFENVKKAIGIFVSTSIEEVFSFPFYNQLLTQTQIDLYNQLLGGISREAGTEKIKGLNEVLNLAIQKNDETAHIIASLPHRFIPLFKQILSDRNTLSFILEEFKSDEEVIQSFCKYKTLLRNENVLETAEALFNELNSIDLTHIFISHKKLETISSALCDHWDTLRNALYERRISELTGKITKSAKEKVQRSLKHEDINLQEIISAAGKELSEAFKQKTSEILSHAHAALDQPLPTTLKKQEEKEILKSQLDSLLGLYHLLDWFAVDESNEVDPEFSARLTGIKLEMEPSLSFYNKARNYATKKPYSVEKFKLNFQMPTLASGWDVNKEKNNGAILFVKNGLYYLGIMPKQKGRYKALSFEPTEKTSEGFDKMYYDYFPDAAKMIPKCSTQLKAVTAHFQTHTTPILLSNNFIEPLEITKEIYDLNNPEKEPKKFQTAYAKKTGDQKGYREALCKWIDFTRDFLSKYTKTTSIDLSSLRPSSQYKDLGEYYAELNPLLYHISFQRIAEKEIMDAVETGKLYLFQIYNKDFAKGHHGKPNLHTLYWTGLFSPENLAKTSIKLNGQAELFYRPKSRMKRMAHRLGEKMLNKKLKDQKTPIPDTLYQELYDYVNHRLSHDLSDEARALLPNVITKEVSHEIIKDRRFTSDKFFFHVPITLNYQAANSPSKFNQRVNAYLKEHPETPIIGIDRGERNLIYITVIDSTGKILEQRSLNTIQQFDYQKKLDNREKERVAARQAWSVVGTIKDLKQGYLSQVIHEIVDLMIHYQAVVVLENLNFGFKSKRTGIAEKAVYQQFEKMLIDKLNCLVLKDYPAEKVGGVLNPYQLTDQFTSFAKMGTQSGFLFYVPAPYTSKIDPLTGFVDPFVWKTIKNHESRKHFLEGFDFLHYDVKTGDFILHFKMNRNLSFQRGLPGFMPAWDIVFEKNETQFDAKGTPFIAGKRIVPVIENHRFTGRYRDLYPANELIALLEEKGIVFRDGSNILPKLLENDDSHAIDTMVALIRSVLQMRNSNAATGEDYINSPVRDLNGVCFDSRFQNPEWPMDADANGAYHIALKGQLLLNHLKESKDLKLQNGISNQDWLAYIQELRNGRSSDDEATADSQHAAPPKKKRKVGGSGGSGGSGGSGGSGGSGGSGGSLEHHHHHH

SEQ ID NO: 25 - protein, 1380 aa, Artificial Sequence
  SYNTHETIC
MPPPKRPRLDGIHGVPAATQFEGFTNLYQVSKTLRFELIPQGKTLKHIQEQGFIEEDKARNDHYKELKPIIDRIYKTYADQCLQLVQLDWENLSAAIDSYRKEKTEETRNALIEEQATYRNAIHDYFIGRTDNLTDAINKRHAEIYKGLFKAELFNGKVLKQLGTVTTTEHENALLRSFDKFTTYFSGFYENRKNVFSAEDISTAIPHRIVQDNFPKFKENCHIFTRLITAVPSLREHFENVKKAIGIFVSTSIEEVFSFPFYNQLLTQTQIDLYNQLLGGISREAGTEKIKGLNEVLNLAIQKNDETAHIIASLPHRFIPLFKQILSDRNTLSFILEEFKSDEEVIQSFCKYKTLLRNENVLETAEALFNELNSIDLTHIFISHKKLETISSALCDHWDTLRNALYERRISELTGKITKSAKEKVQRSLKHEDINLQEIISAAGKELSEAFKQKTSEILSHAHAALDQPLPTTLKKQEEKEILKSQLDSLLGLYHLLDWFAVDESNEVDPEFSARLTGIKLEMEPSLSFYNKARNYATKKPYSVEKFKLNFQMPTLASGWDVNKEKNNGAILFVKNGLYYLGIMPKQKGRYKALSFEPTEKTSEGFDKMYYDYFPDAAKMIPKCSTQLKAVTAHFQTHTTPILLSNNFIEPLEITKEIYDLNNPEKEPKKFQTAYAKKTGDQKGYREALCKWIDFTRDFLSKYTKTTSIDLSSLRPSSQYKDLGEYYAELNPLLYHISFQRIAEKEIMDAVETGKLYLFQIYNKDFAKGHHGKPNLHTLYWTGLFSPENLAKTSIKLNGQAELFYRPKSRMKRMAHRLGEKMLNKKLKDQKTPIPDTLYQELYDYVNHRLSHDLSDEARALLPNVITKEVSHEIIKDRRFTSDKFFFHVPITLNYQAANSPSKFNQRVNAYLKEHPETPIIGIDRGERNLIYITVIDSTGKILEQRSLNTIQQFDYQKKLDNREKERVAARQAWSVVGTIKDLKQGYLSQVIHEIVDLMIHYQAVVVLENLNFGFKSKRTGIAEKAVYQQFEKMLIDKLNCLVLKDYPAEKVGGVLNPYQLTDQFTSFAKMGTQSGFLFYVPAPYTSKIDPLTGFVDPFVWKTIKNHESRKHFLEGFDFLHYDVKTGDFILHFKMNRNLSFQRGLPGFMPAWDIVFEKNETQFDAKGTPFIAGKRIVPVIENHRFTGRYRDLYPANELIALLEEKGIVFRDGSNILPKLLENDDSHAIDTMVALIRSVLQMRNSNAATGEDYINSPVRDLNGVCFDSRFQNPEWPMDADANGAYHIALKGQLLLNHLKESKDLKLQNGISNQDWLAYIQELRNGRSSDDEATADSQHAAPPKKKRKVGGSGGSGGSGGSGGSGGSGGSGGSLEHHHHHH

SEQ ID NO: 26 - protein, 1393 aa, Artificial Sequence
  SYNTHETIC
MSSDDEATADSQHAAPPKKKRKVGIHGVPAATQFEGFTNLYQVSKTLRFELIPQGKTLKHIQEQGFIEEDKARNDHYKELKPIIDRIYKTYADQCLQLVQLDWENLSAAIDSYRKEKTEETRNALIEEQATYRNAIHDYFIGRTDNLTDAINKRHAEIYKGLFKAELFNGKVLKQLGTVTTTEHENALLRSFDKFTTYFSGFYENRKNVFSAEDISTAIPHRIVQDNFPKFKENCHIFTRLITAVPSLREHFENVKKAIGIFVSTSIEEVFSFPFYNQLLTQTQIDLYNQLLGGISREAGTEKIKGLNEVLNLAIQKNDETAHIIASLPHRFIPLFKQILSDRNTLSFILEEFKSDEEVIQSFCKYKTLLRNENVLETAEALFNELNSIDLTHIFISHKKLETISSALCDHWDTLRNALYERRISELTGKITKSAKEKVQRSLKHEDINLQEIISAAGKELSEAFKQKTSEILSHAHAALDQPLPTTLKKQEEKEILKSQLDSLLGLYHLLDWFAVDESNEVDPEFSARLTGIKLEMEPSLSFYNKARNYATKKPYSVEKFKLNFQMPTLASGWDVNKEKNNGAILFVKNGLYYLGIMPKQKGRYKALSFEPTEKTSEGFDKMYYDYFPDAAKMIPKCSTQLKAVTAHFQTHTTPILLSNNFIEPLEITKEIYDLNNPEKEPKKFQTAYAKKTGDQKGYREALCKWIDFTRDFLSKYTKTTSIDLSSLRPSSQYKDLGEYYAELNPLLYHISFQRIAEKEIMDAVETGKLYLFQIYNKDFAKGHHGKPNLHTLYWTGLFSPENLAKTSIKLNGQAELFYRPKSRMKRMAHRLGEKMLNKKLKDQKTPIPDTLYQELYDYVNHRLSHDLSDEARALLPNVITKEVSHEIIKDRRFTSDKFFFHVPITLNYQAANSPSKFNQRVNAYLKEHPETPIIGIDRGERNLIYITVIDSTGKILEQRSLNTIQQFDYQKKLDNREKERVAARQAWSVVGTIKDLKQGYLSQVIHEIVDLMIHYQAVVVLENLNFGFKSKRTGIAEKAVYQQFEKMLIDKLNCLVLKDYPAEKVGGVLNPYQLTDQFTSFAKMGTQSGFLFYVPAPYTSKIDPLTGFVDPFVWKTIKNHESRKHFLEGFDFLHYDVKTGDFILHFKMNRNLSFQRGLPGFMPAWDIVFEKNETQFDAKGTPFIAGKRIVPVIENHRFTGRYRDLYPANELIALLEEKGIVFRDGSNILPKLLENDDSHAIDTMVALIRSVLQMRNSNAATGEDYINSPVRDLNGVCFDSRFQNPEWPMDADANGAYHIALKGQLLLNHLKESKDLKLQNGISNQDWLAYIQELRNGRSSDDEATADSQHAAPPKKKRKVGGSGGSGGSGGSGGSGGSGGSGGSLEHHHHHH

SEQ ID NO: 27 - protein, 1357 aa, Artificial Sequence
  SYNTHETIC
MTQFEGFTNLYQVSKTLRFELIPQGKTLKHIQEQGFIEEDKARNDHYKELKPIIDRIYKTYADQCLQLVQLDWENLSAAIDSYRKEKTEETRNALIEEQATYRNAIHDYFIGRTDNLTDAINKRHAEIYKGLFKAELFNGKVLKQLGTVTTTEHENALLRSFDKFTTYFSGFYENRKNVFSAEDISTAIPHRIVQDNFPKFKENCHIFTRLITAVPSLREHFENVKKAIGIFVSTSIEEVFSFPFYNQLLTQTQIDLYNQLLGGISREAGTEKIKGLNEVLNLAIQKNDETAHIIASLPHRFIPLFKQILSDRNTLSFILEEFKSDEEVIQSFCKYKTLLRNENVLETAEALFNELNSIDLTHIFISHKKLETISSALCDHWDTLRNALYERRISELTGKITKSAKEKVQRSLKHEDINLQEIISAAGKELSEAFKQKTSEILSHAHAALDQPLPTTLKKQEEKEILKSQLDSLLGLYHLLDWFAVDESNEVDPEFSARLTGIKLEMEPSLSFYNKARNYATKKPYSVEKFKLNFQMPTLASGWDVNKEKNNGAILFVKNGLYYLGIMPKQKGRYKALSFEPTEKTSEGFDKMYYDYFPDAAKMIPKCSTQLKAVTAHFQTHTTPILLSNNFIEPLEITKEIYDLNNPEKEPKKFQTAYAKKTGDQKGYREALCKWIDFTRDFLSKYTKTTSIDLSSLRPSSQYKDLGEYYAELNPLLYHISFQRIAEKEIMDAVETGKLYLFQIYNKDFAKGHHGKPNLHTLYWTGLFSPENLAKTSIKLNGQAELFYRPKSRMKRMAHRLGEKMLNKKLKDQKTPIPDTLYQELYDYVNHRLSHDLSDEARALLPNVITKEVSHEIIKDRRFTSDKFFFHVPITLNYQAANSPSKFNQRVNAYLKEHPETPIIGIDRGERNLIYITVIDSTGKILEQRSLNTIQQFDYQKKLDNREKERVAARQAWSVVGTIKDLKQGYLSQVIHEIVDLMIHYQAVVVLENLNFGFKSKRTGIAEKAVYQQFEKMLIDKLNCLVLKDYPAEKVGGVLNPYQLTDQFTSFAKMGTQSGFLFYVPAPYTSKIDPLTGFVDPFVWKTIKNHESRKHFLEGFDFLHYDVKTGDFILHFKMNRNLSFQRGLPGFMPAWDIVFEKNETQFDAKGTPFIAGKRIVPVIENHRFTGRYRDLYPANELIALLEEKGIVFRDGSNILPKLLENDDSHAIDTMVALIRSVLQMRNSNAATGEDYINSPVRDLNGVCFDSRFQNPEWPMDADANGAYHIALKGQLLLNHLKESKDLKLQNGISNQDWLAYIQELRNGRKRPAATKKAGQAKKKKGGSGGSGGSGGSGGSGGSGGSGGSLEHHHHHH

SEQ ID NO: 28 - protein, 1360 aa, Artificial Sequence
  SYNTHETIC
MTQFEGFTNLYQVSKTLRFELIPQGKTLKHIQEQGFIEEDKARNDHYKELKPIIDRIYKTYADQCLQLVQLDWENLSAAIDSYRKEKTEETRNALIEEQATYRNAIHDYFIGRTDNLTDAINKRHAEIYKGLFKAELFNGKVLKQLGTVTTTEHENALLRSFDKFTTYFSGFYENRKNVFSAEDISTAIPHRIVQDNFPKFKENCHIFTRLITAVPSLREHFENVKKAIGIFVSTSIEEVFSFPFYNQLLTQTQIDLYNQLLGGISREAGTEKIKGLNEVLNLAIQKNDETAHIIASLPHRFIPLFKQILSDRNTLSFILEEFKSDEEVIQSFCKYKTLLRNENVLETAEALFNELNSIDLTHIFISHKKLETISSALCDHWDTLRNALYERRISELTGKITKSAKEKVQRSLKHEDINLQEIISAAGKELSEAFKQKTSEILSHAHAALDQPLPTTLKKQEEKEILKSQLDSLLGLYHLLDWFAVDESNEVDPEFSARLTGIKLEMEPSLSFYNKARNYATKKPYSVEKFKLNFQMPTLASGWDVNKEKNNGAILFVKNGLYYLGIMPKQKGRYKALSFEPTEKTSEGFDKMYYDYFPDAAKMIPKCSTQLKAVTAHFQTHTTPILLSNNFIEPLEITKEIYDLNNPEKEPKKFQTAYAKKTGDQKGYREALCKWIDFTRDFLSKYTKTTSIDLSSLRPSSQYKDLGEYYAELNPLLYHISFQRIAEKEIMDAVETGKLYLFQIYNKDFAKGHHGKPNLHTLYWTGLFSPENLAKTSIKLNGQAELFYRPKSRMKRMAHRLGEKMLNKKLKDQKTPIPDTLYQELYDYVNHRLSHDLSDEARALLPNVITKEVSHEIIKDRRFTSDKFFFHVPITLNYQAANSPSKFNQRVNAYLKEHPETPIIGIDRGERNLIYITVIDSTGKILEQRSLNTIQQFDYQKKLDNREKERVAARQAWSVVGTIKDLKQGYLSQVIHEIVDLMIHYQAVVVLENLNFGFKSKRTGIAEKAVYQQFEKMLIDKLNCLVLKDYPAEKVGGVLNPYQLTDQFTSFAKMGTQSGFLFYVPAPYTSKIDPLTGFVDPFVWKTIKNHESRKHFLEGFDFLHYDVKTGDFILHFKMNRNLSFQRGLPGFMPAWDIVFEKNETQFDAKGTPFIAGKRIVPVIENHRFTGRYRDLYPANELIALLEEKGIVFRDGSNILPKLLENDDSHAIDTMVALIRSVLQMRNSNAATGEDYINSPVRDLNGVCFDSRFQNPEWPMDADANGAYHIALKGQLLLNHLKESKDLKLQNGISNQDWLAYIQELRNGRKRTADGSEFESPKKKRKVEGGSGGSGGSGGSGGSGGSGGSGGSLEHHHHHH

SEQ ID NO: 29 - protein, 1388 aa, Artificial Sequence
  SYNTHETIC
MTQFEGFTNLYQVSKTLRFELIPQGKTLKHIQEQGFIEEDKARNDHYKELKPIIDRIYKTYADQCLQLVQLDWENLSAAIDSYRKEKTEETRNALIEEQATYRNAIHDYFIGRTDNLTDAINKRHAEIYKGLFKAELFNGKVLKQLGTVTTTEHENALLRSFDKFTTYFSGFYENRKNVFSAEDISTAIPHRIVQDNFPKFKENCHIFTRLITAVPSLREHFENVKKAIGIFVSTSIEEVFSFPFYNQLLTQTQIDLYNQLLGGISREAGTEKIKGLNEVLNLAIQKNDETAHIIASLPHRFIPLFKQILSDRNTLSFILEEFKSDEEVIQSFCKYKTLLRNENVLETAEALFNELNSIDLTHIFISHKKLETISSALCDHWDTLRNALYERRISELTGKITKSAKEKVQRSLKHEDINLQEIISAAGKELSEAFKQKTSEILSHAHAALDQPLPTTLKKQEEKEILKSQLDSLLGLYHLLDWFAVDESNEVDPEFSARLTGIKLEMEPSLSFYNKARNYATKKPYSVEKFKLNFQMPTLASGWDVNKEKNNGAILFVKNGLYYLGIMPKQKGRYKALSFEPTEKTSEGFDKMYYDYFPDAAKMIPKCSTQLKAVTAHFQTHTTPILLSNNFIEPLEITKEIYDLNNPEKEPKKFQTAYAKKTGDQKGYREALCKWIDFTRDFLSKYTKTTSIDLSSLRPSSQYKDLGEYYAELNPLLYHISFQRIAEKEIMDAVETGKLYLFQIYNKDFAKGHHGKPNLHTLYWTGLFSPENLAKTSIKLNGQAELFYRPKSRMKRMAHRLGEKMLNKKLKDQKTPIPDTLYQELYDYVNHRLSHDLSDEARALLPNVITKEVSHEIIKDRRFTSDKFFFHVPITLNYQAANSPSKFNQRVNAYLKEHPETPIIGIDRGERNLIYITVIDSTGKILEQRSLNTIQQFDYQKKLDNREKERVAARQAWSVVGTIKDLKQGYLSQVIHEIVDLMIHYQAVVVLENLNFGFKSKRTGIAEKAVYQQFEKMLIDKLNCLVLKDYPAEKVGGVLNPYQLTDQFTSFAKMGTQSGFLFYVPAPYTSKIDPLTGFVDPFVWKTIKNHESRKHFLEGFDFLHYDVKTGDFILHFKMNRNLSFQRGLPGFMPAWDIVFEKNETQFDAKGTPFIAGKRIVPVIENHRFTGRYRDLYPANELIALLEEKGIVFRDGSNILPKLLENDDSHAIDTMVALIRSVLQMRNSNAATGEDYINSPVRDLNGVCFDSRFQNPEWPMDADANGAYHIALKGQLLLNHLKESKDLKLQNGISNQDWLAYIQELRNGRSSDDEATADSQHAAPPKKKRKVGGSGGSKRTADGSEFESPKKKRKVEGGSGGSGGSGGSGGSGGSGGSGGSLEHHHHHH

SEQ ID NO: 30 - protein, 1382 aa, Artificial Sequence
  SYNTHETIC
MTQFEGFTNLYQVSKTLRFELIPQGKTLKHIQEQGFIEEDKARNDHYKELKPIIDRIYKTYADQCLQLVQLDWENLSAAIDSYRKEKTEETRNALIEEQATYRNAIHDYFIGRTDNLTDAINKRHAEIYKGLFKAELFNGKVLKQLGTVTTTEHENALLRSFDKFTTYFSGFYENRKNVFSAEDISTAIPHRIVQDNFPKFKENCHIFTRLITAVPSLREHFENVKKAIGIFVSTSIEEVFSFPFYNQLLTQTQIDLYNQLLGGISREAGTEKIKGLNEVLNLAIQKNDETAHIIASLPHRFIPLFKQILSDRNTLSFILEEFKSDEEVIQSFCKYKTLLRNENVLETAEALFNELNSIDLTHIFISHKKLETISSALCDHWDTLRNALYERRISELTGKITKSAKEKVQRSLKHEDINLQEIISAAGKELSEAFKQKTSEILSHAHAALDQPLPTTLKKQEEKEILKSQLDSLLGLYHLLDWFAVDESNEVDPEFSARLTGIKLEMEPSLSFYNKARNYATKKPYSVEKFKLNFQMPTLASGWDVNKEKNNGAILFVKNGLYYLGIMPKQKGRYKALSFEPTEKTSEGFDKMYYDYFPDAAKMIPKCSTQLKAVTAHFQTHTTPILLSNNFIEPLEITKEIYDLNNPEKEPKKFQTAYAKKTGDQKGYREALCKWIDFTRDFLSKYTKTTSIDLSSLRPSSQYKDLGEYYAELNPLLYHISFQRIAEKEIMDAVETGKLYLFQIYNKDFAKGHHGKPNLHTLYWTGLFSPENLAKTSIKLNGQAELFYRPKSRMKRMAHRLGEKMLNKKLKDQKTPIPDTLYQELYDYVNHRLSHDLSDEARALLPNVITKEVSHEIIKDRRFTSDKFFFHVPITLNYQAANSPSKFNQRVNAYLKEHPETPIIGIDRGERNLIYITVIDSTGKILEQRSLNTIQQFDYQKKLDNREKERVAARQAWSVVGTIKDLKQGYLSQVIHEIVDLMIHYQAVVVLENLNFGFKSKRTGIAEKAVYQQFEKMLIDKLNCLVLKDYPAEKVGGVLNPYQLTDQFTSFAKMGTQSGFLFYVPAPYTSKIDPLTGFVDPFVWKTIKNHESRKHFLEGFDFLHYDVKTGDFILHFKMNRNLSFQRGLPGFMPAWDIVFEKNETQFDAKGTPFIAGKRIVPVIENHRFTGRYRDLYPANELIALLEEKGIVFRDGSNILPKLLENDDSHAIDTMVALIRSVLQMRNSNAATGEDYINSPVRDLNGVCFDSRFQNPEWPMDADANGAYHIALKGQLLLNHLKESKDLKLQNGISNQDWLAYIQELRNGRKRPAATKKAGQAKKKKGGSGGSKRTADGSEFESPKKKRKVEGGSGGSGGSGGSGGSGGSGGSGGSLEHHHHHH

SEQ ID NO: 31 - DNA, 25 bp, Artificial Sequence
  SYNTHETIC
ttttacataaaactcttttaggtta

SEQ ID NO: 32 - DNA, 25 bp, Artificial Sequence
  SYNTHETIC
tttcacataaaactcttttaggtta

SEQ ID NO: 33 - DNA, 25 bp, Artificial Sequence
  SYNTHETIC
ttttcccctccctggcttttattat

SEQ ID NO: 34 - DNA, 25 bp, Artificial Sequence
  SYNTHETIC
tttcccctccctggcttttattatt

SEQ ID NO: 35 - DNA, 25 bp, Artificial Sequence
  SYNTHETIC
ttttattattacaactctgtgcttt

SEQ ID NO: 36 - DNA, 25 bp, Artificial Sequence
  SYNTHETIC
tttattattacaactctgtgctttt

SEQ ID NO: 37 - DNA, 25 bp, Artificial Sequence
  SYNTHETIC
tttttcatcaccatcctgaatatct

SEQ ID NO: 38 - DNA, 25 bp, Artificial Sequence
  SYNTHETIC
ttttcatcaccatcctgaatatcta

SEQ ID NO: 39 - DNA, 25 bp, Artificial Sequence
  SYNTHETIC
tttcatcaccatcctgaatatctat

SEQ ID NO: 40 - DNA, 25 bp, Artificial Sequence
  SYNTHETIC
tttatactattaataaaaagacatt

SEQ ID NO: 41 - DNA, 25 bp, Artificial Sequence
  SYNTHETIC
tttattaatagtataaatattaatt

SEQ ID NO: 42 - DNA, 25 bp, Artificial Sequence
  SYNTHETIC
ttttattaatagtataaatattaat

SEQ ID NO: 43 - DNA, 25 bp, Artificial Sequence
  SYNTHETIC
tttttattaatagtataaatattaa

SEQ ID NO: 44 - DNA, 25 bp, Artificial Sequence
  SYNTHETIC
tttttggtaaggaggagttttcact

SEQ ID NO: 45 - DNA, 25 bp, Artificial Sequence
  SYNTHETIC
ttttggtaaggaggagttttcactg

SEQ ID NO: 46 - DNA, 25 bp, Artificial Sequence
  SYNTHETIC
tttggtaaggaggagttttcactga

SEQ ID NO: 47 - DNA, 25 bp, Artificial Sequence
  SYNTHETIC
ttttcactgaagttcagcagtgatg

SEQ ID NO: 48 - DNA, 25 bp, Artificial Sequence
  SYNTHETIC
tttcactgaagttcagcagtgatgg

SEQ ID NO: 49 - DNA, 25 bp, Artificial Sequence
  SYNTHETIC
tttcactaacctggtaaaagaggat

SEQ ID NO: 50 - DNA, 25 bp, Artificial Sequence
  SYNTHETIC
tttaccaggttagtgaaacgcagac

SEQ ID NO: 51 - DNA, 25 bp, Artificial Sequence
  SYNTHETIC
ttttaccaggttagtgaaacgcaga

SEQ ID NO: 52 - DNA, 25 bp, Artificial Sequence
  SYNTHETIC
ttttttttgtgggtgtaatagtgac

SEQ ID NO: 53 - DNA, 25 bp, Artificial Sequence
  SYNTHETIC
tttttttgtgggtgtaatagtgaca

SEQ ID NO: 54 - DNA, 25 bp, Artificial Sequence
  SYNTHETIC
ttttttgtgggtgtaatagtgacat

SEQ ID NO: 55 - DNA, 25 bp, Artificial Sequence
  SYNTHETIC
tttttgtgggtgtaatagtgacatt

SEQ ID NO: 56 - DNA, 25 bp, Artificial Sequence
  SYNTHETIC
ttttgtgggtgtaatagtgacattt

SEQ ID NO: 57 - DNA, 23 bp, Artificial Sequence
  SYNTHETIC
tcccactgtacctctgttatcca

SEQ ID NO: 58 - DNA, 23 bp, Artificial Sequence
  SYNTHETIC
tggtcctcgtcatttagcagttt

SEQ ID NO: 59 - protein, 1307 aa, Artificial Sequence
  SYNTHETIC
MTQFEGFTNLYQVSKTLRFELIPQGKTLKHIQEQGFIEEDKARNDHYKELKPIIDRIYKTYADQCLQLVQLDWENLSAAIDSYRKEKTEETRNALIEEQATYRNAIHDYFIGRTDNLTDAINKRHAEIYKGLFKAELFNGKVLKQLGTVTTTEHENALLRSFDKFTTYFSGFYENRKNVFSAEDISTAIPHRIVQDNFPKFKENCHIFTRLITAVPSLREHFENVKKAIGIFVSTSIEEVFSFPFYNQLLTQTQIDLYNQLLGGISREAGTEKIKGLNEVLNLAIQKNDETAHIIASLPHRFIPLFKQILSDRNTLSFILEEFKSDEEVIQSFCKYKTLLRNENVLETAEALFNELNSIDLTHIFISHKKLETISSALCDHWDTLRNALYERRISELTGKITKSAKEKVQRSLKHEDINLQEIISAAGKELSEAFKQKTSEILSHAHAALDQPLPTTLKKQEEKEILKSQLDSLLGLYHLLDWFAVDESNEVDPEFSACLTGIKLEMEPSLSFYNKARNYATKKPYSVEKFKLNFQMPTLASGWDVNKEKNNGAILFVKNGLYYLGIMPKQKGRYKALSFEPTEKTSEGFDKMYYDYFPDAAKMIPKCSTQLKAVTAHFQTHTTPILLSNNFIEPLEITKEIYDLNNPEKEPKKFQTAYAKKTGDQKGYREALCKWIDFTRDFLSKYTKTTSIDLSSLRPSSQYKDLGEYYAELNPLLYHISFQRIAEKEIMDAVETGKLYLFQIYNKDFAKGHHGKPNLHTLYWTGLFSPENLAKTSIKLNGQAELFYRPKSRMKRMAHRLGEKMLNKKLKDQKTPIPDTLYQELYDYVNHRLSHDLSDEARALLPNVITKEVSHEIIKDRRFTSDKFFFHVPITLNYQAANSPSKFNQRVNAYLKEHPETPIIGIDRGERNLIYITVIDSTGKILEQRSLNTIQQFDYQKKLDNREKERVAARQAWSVVGTIKDLKQGYLSQVIHEIVDLMIHYQAVVVLENLNFGFKSKRTGIAEKAVYQQFEKMLIDKLNCLVLKDYPAEKVGGVLNPYQLTDQFTSFAKMGTQSGFLFYVPAPYTSKIDPLTGFVDPFVWKTIKNHESRKHFLEGFDFLHYDVKTGDFILHFKMNRNLSFQRGLPGFMPAWDIVFEKNETQFDAKGTPFIAGKRIVPVIENHRFTGRYRDLYPANELIALLEEKGIVFRDGSNILPKLLENDDSHAIDTMVALIRSVLQMRNSNAATGEDYINSPVRDLNGVCFDSRFQNPEWPMDADANGAYHIALKGQLLLNHLKESKDLKLQNGISNQDWLAYIQELRN

SEQ ID NO: 60 - protein, 1307 aa, Artificial Sequence
  SYNTHETIC
MTQFEGFTNLYQVSKTLRFELIPQGKTLKHIQEQGFIEEDKARNDHYKELKPIIDRIYKTYADQCLQLVQLDWENLSAAIDSYRKEKTEETRNALIEEQATYRNAIHDYFIGRTDNLTDAINKRHAEIYKGLFKAELFNGKVLKQLGTVTTTEHENALLRSFDKFTTYFSGFYENRKNVFSAEDISTAIPHRIVQDNFPKFKENCHIFTRLITAVPSLREHFENVKKAIGIFVSTSIEEVFSFPFYNQLLTQTQIDLYNQLLGGISREAGTEKIKGLNEVLNLAIQKNDETAHIIASLPHRFIPLFKQILSDRNTLSFILEEFKSDEEVIQSFCKYKTLLRNENVLETAEALFNELNSIDLTHIFISHKKLETISSALCDHWDTLRNALYERRISELTGKITKSAKEKVQRSLKHEDINLQEIISAAGKELSEAFKQKTSEILSHAHAALDQPLPTTLKKQEEKEILKSQLDSLLGLYHLLDWFAVDESNEVDPEFSALLTGIKLEMEPSLSFYNKARNYATKKPYSVEKFKLNFQMPTLASGWDVNKEKNNGAILFVKNGLYYLGIMPKQKGRYKALSFEPTEKTSEGFDKMYYDYFPDAAKMIPKCSTQLKAVTAHFQTHTTPILLSNNFIEPLEITKEIYDLNNPEKEPKKFQTAYAKKTGDQKGYREALCKWIDFTRDFLSKYTKTTSIDLSSLRPSSQYKDLGEYYAELNPLLYHISFQRIAEKEIMDAVETGKLYLFQIYNKDFAKGHHGKPNLHTLYWTGLFSPENLAKTSIKLNGQAELFYRPKSRMKRMAHRLGEKMLNKKLKDQKTPIPDTLYQELYDYVNHRLSHDLSDEARALLPNVITKEVSHEIIKDRRFTSDKFFFHVPITLNYQAANSPSKFNQRVNAYLKEHPETPIIGIDRGERNLIYITVIDSTGKILEQRSLNTIQQFDYQKKLDNREKERVAARQAWSVVGTIKDLKQGYLSQVIHEIVDLMIHYQAVVVLENLNFGFKSKRTGIAEKAVYQQFEKMLIDKLNCLVLKDYPAEKVGGVLNPYQLTDQFTSFAKMGTQSGFLFYVPAPYTSKIDPLTGFVDPFVWKTIKNHESRKHFLEGFDFLHYDVKTGDFILHFKMNRNLSFQRGLPGFMPAWDIVFEKNETQFDAKGTPFIAGKRIVPVIENHRFTGRYRDLYPANELIALLEEKGIVFRDGSNILPKLLENDDSHAIDTMVALIRSVLQMRNSNAATGEDYINSPVRDLNGVCFDSRFQNPEWPMDADANGAYHIALKGQLLLNHLKESKDLKLQNGISNQDWLAYIQELRN

SEQ ID NO: 61 - protein, 1307 aa, Artificial Sequence
  SYNTHETIC
MTQFEGFTNLYQVSKTLRFELIPQGKTLKHIQEQGFIEEDKARNDHYKELKPIIDRIYKTYADQCLQLVQLDWENLSAAIDSYRKEKTEETRNALIEEQATYRNAIHDYFIGRTDNLTDAINKRHAEIYKGLFKAELFNGKVLKQLGTVTTTEHENALLRSFDKFTTYFSGFYENRKNVFSAEDISTAIPHRIVQDNFPKFKENCHIFTRLITAVPSLREHFENVKKAIGIFVSTSIEEVFSFPFYNQLLTQTQIDLYNQLLGGISREAGTEKIKGLNEVLNLAIQKNDETAHIIASLPHRFIPLFKQILSDRNTLSFILEEFKSDEEVIQSFCKYKTLLRNENVLETAEALFNELNSIDLTHIFISHKKLETISSALCDHWDTLRNALYERRISELTGKITKSAKEKVQRSLKHEDINLQEIISAAGKELSEAFKQKTSEILSHAHAALDQPLPTTLKKQEEKEILKSQLDSLLGLYHLLDWFAVDESNEVDPEFSAKLTGIKLEMEPSLSFYNKARNYATKKPYSVEKFKLNFQMPTLASGWDVNKEKNNGAILFVKNGLYYLGIMPKQKGRYKALSFEPTEKTSEGFDKMYYDYFPDAAKMIPKCSTQLKAVTAHFQTHTTPILLSNNFIEPLEITKEIYDLNNPEKEPKKFQTAYAKKTGDQKGYREALCKWIDFTRDFLSKYTKTTSIDLSSLRPSSQYKDLGEYYAELNPLLYHISFQRIAEKEIMDAVETGKLYLFQIYNKDFAKGHHGKPNLHTLYWTGLFSPENLAKTSIKLNGQAELFYRPKSRMKRMAHRLGEKMLNKKLKDQKTPIPDTLYQELYDYVNHRLSHDLSDEARALLPNVITKEVSHEIIKDRRFTSDKFFFHVPITLNYQAANSPSKFNQRVNAYLKEHPETPIIGIDRGERNLIYITVIDSTGKILEQRSLNTIQQFDYQKKLDNREKERVAARQAWSVVGTIKDLKQGYLSQVIHEIVDLMIHYQAVVVLENLNFGFKSKRTGIAEKAVYQQFEKMLIDKLNCLVLKDYPAEKVGGVLNPYQLTDQFTSFAKMGTQSGFLFYVPAPYTSKIDPLTGFVDPFVWKTIKNHESRKHFLEGFDFLHYDVKTGDFILHFKMNRNLSFQRGLPGFMPAWDIVFEKNETQFDAKGTPFIAGKRIVPVIENHRFTGRYRDLYPANELIALLEEKGIVFRDGSNILPKLLENDDSHAIDTMVALIRSVLQMRNSNAATGEDYINSPVRDLNGVCFDSRFQNPEWPMDADANGAYHIALKGQLLLNHLKESKDLKLQNGISNQDWLAYIQELRN

SEQ ID NO: 62 - protein, 1307 aa, Artificial Sequence
  SYNTHETIC
MTQFEGFTNLYQVSKTLRFELIPQGKTLKHIQEQGFIEEDKARNDHYKELKPIIDRIYKTYADQCLQLVQLDWENLSAAIDSYRKEKTEETRNALIEEQATYRNAIHDYFIGRTDNLTDAINKRHAEIYKGLFKAELFNGKVLKQLGTVTTTEHENALLRSFDKFTTYFSGFYENRKNVFSAEDISTAIPHRIVQDNFPKFKENCHIFTRLITAVPSLREHFENVKKAIGIFVSTSIEEVFSFPFYNQLLTQTQIDLYNQLLGGISREAGTEKIKGLNEVLNLAIQKNDETAHIIASLPHRFIPLFKQILSDRNTLSFILEEFKSDEEVIQSFCKYKTLLRNENVLETAEALFNELNSIDLTHIFISHKKLETISSALCDHWDTLRNALYERRISELTGKITKSAKEKVQRSLKHEDINLQEIISAAGKELSEAFKQKTSEILSHAHAALDQPLPTTLKKQEEKEILKSQLDSLLGLYHLLDWFAVDESNEVDPEFSARMTGIKLEMEPSLSFYNKARNYATKKPYSVEKFKLNFQMPTLASGWDVNKEKNNGAILFVKNGLYYLGIMPKQKGRYKALSFEPTEKTSEGFDKMYYDYFPDAAKMIPKCSTQLKAVTAHFQTHTTPILLSNNFIEPLEITKEIYDLNNPEKEPKKFQTAYAKKTGDQKGYREALCKWIDFTRDFLSKYTKTTSIDLSSLRPSSQYKDLGEYYAELNPLLYHISFQRIAEKEIMDAVETGKLYLFQIYNKDFAKGHHGKPNLHTLYWTGLFSPENLAKTSIKLNGQAELFYRPKSRMKRMAHRLGEKMLNKKLKDQKTPIPDTLYQELYDYVNHRLSHDLSDEARALLPNVITKEVSHEIIKDRRFTSDKFFFHVPITLNYQAANSPSKFNQRVNAYLKEHPETPIIGIDRGERNLIYITVIDSTGKILEQRSLNTIQQFDYQKKLDNREKERVAARQAWSVVGTIKDLKQGYLSQVIHEIVDLMIHYQAVVVLENLNFGFKSKRTGIAEKAVYQQFEKMLIDKLNCLVLKDYPAEKVGGVLNPYQLTDQFTSFAKMGTQSGFLFYVPAPYTSKIDPLTGFVDPFVWKTIKNHESRKHFLEGFDFLHYDVKTGDFILHFKMNRNLSFQRGLPGFMPAWDIVFEKNETQFDAKGTPFIAGKRIVPVIENHRFTGRYRDLYPANELIALLEEKGIVFRDGSNILPKLLENDDSHAIDTMVALIRSVLQMRNSNAATGEDYINSPVRDLNGVCFDSRFQNPEWPMDADANGAYHIALKGQLLLNHLKESKDLKLQNGISNQDWLAYIQELRN

SEQ ID NO: 63 - protein, 1307 aa, Artificial Sequence
  SYNTHETIC
MTQFEGFTNLYQVSKTLRFELIPQGKTLKHIQEQGFIEEDKARNDHYKELKPIIDRIYKTYADQCLQLVQLDWENLSAAIDSYRKEKTEETRNALIEEQATYRNAIHDYFIGRTDNLTDAINKRHAEIYKGLFKAELFNGKVLKQLGTVTTTEHENALLRSFDKFTTYFSGFYENRKNVFSAEDISTAIPHRIVQDNFPKFKENCHIFTRLITAVPSLREHFENVKKAIGIFVSTSIEEVFSFPFYNQLLTQTQIDLYNQLLGGISREAGTEKIKGLNEVLNLAIQKNDETAHIIASLPHRFIPLFKQILSDRNTLSFILEEFKSDEEVIQSFCKYKTLLRNENVLETAEALFNELNSIDLTHIFISHKKLETISSALCDHWDTLRNALYERRISELTGKITKSAKEKVQRSLKHEDINLQEIISAAGKELSEAFKQKTSEILSHAHAALDQPLPTTLKKQEEKEILKSQLDSLLGLYHLLDWFAVDESNEVDPEFSARLLGIKLEMEPSLSFYNKARNYATKKPYSVEKFKLNFQMPTLASGWDVNKEKNNGAILFVKNGLYYLGIMPKQKGRYKALSFEPTEKTSEGFDKMYYDYFPDAAKMIPKCSTQLKAVTAHFQTHTTPILLSNNFIEPLEITKEIYDLNNPEKEPKKFQTAYAKKTGDQKGYREALCKWIDFTRDFLSKYTKTTSIDLSSLRPSSQYKDLGEYYAELNPLLYHISFQRIAEKEIMDAVETGKLYLFQIYNKDFAKGHHGKPNLHTLYWTGLFSPENLAKTSIKLNGQAELFYRPKSRMKRMAHRLGEKMLNKKLKDQKTPIPDTLYQELYDYVNHRLSHDLSDEARALLPNVITKEVSHEIIKDRRFTSDKFFFHVPITLNYQAANSPSKFNQRVNAYLKEHPETPIIGIDRGERNLIYITVIDSTGKILEQRSLNTIQQFDYQKKLDNREKERVAARQAWSVVGTIKDLKQGYLSQVIHEIVDLMIHYQAVVVLENLNFGFKSKRTGIAEKAVYQQFEKMLIDKLNCLVLKDYPAEKVGGVLNPYQLTDQFTSFAKMGTQSGFLFYVPAPYTSKIDPLTGFVDPFVWKTIKNHESRKHFLEGFDFLHYDVKTGDFILHFKMNRNLSFQRGLPGFMPAWDIVFEKNETQFDAKGTPFIAGKRIVPVIENHRFTGRYRDLYPANELIALLEEKGIVFRDGSNILPKLLENDDSHAIDTMVALIRSVLQMRNSNAATGEDYINSPVRDLNGVCFDSRFQNPEWPMDADANGAYHIALKGQLLLNHLKESKDLKLQNGISNQDWLAYIQELRN

SEQ ID NO: 64 - protein, 1307 aa, Artificial Sequence
  SYNTHETIC
MTQFEGFTNLYQVSKTLRFELIPQGKTLKHIQEQGFIEEDKARNDHYKELKPIIDRIYKTYADQCLQLVQLDWENLSAAIDSYRKEKTEETRNALIEEQATYRNAIHDYFIGRTDNLTDAINKRHAEIYKGLFKAELFNGKVLKQLGTVTTTEHENALLRSFDKFTTYFSGFYENRKNVFSAEDISTAIPHRIVQDNFPKFKENCHIFTRLITAVPSLREHFENVKKAIGIFVSTSIEEVFSFPFYNQLLTQTQIDLYNQLLGGISREAGTEKIKGLNEVLNLAIQKNDETAHIIASLPHRFIPLFKQILSDRNTLSFILEEFKSDEEVIQSFCKYKTLLRNENVLETAEALFNELNSIDLTHIFISHKKLETISSALCDHWDTLRNALYERRISELTGKITKSAKEKVQRSLKHEDINLQEIISAAGKELSEAFKQKTSEILSHAHAALDQPLPTTLKKQEEKEILKSQLDSLLGLYHLLDWFAVDESNEVDPEFSARLMGIKLEMEPSLSFYNKARNYATKKPYSVEKFKLNFQMPTLASGWDVNKEKNNGAILFVKNGLYYLGIMPKQKGRYKALSFEPTEKTSEGFDKMYYDYFPDAAKMIPKCSTQLKAVTAHFQTHTTPILLSNNFIEPLEITKEIYDLNNPEKEPKKFQTAYAKKTGDQKGYREALCKWIDFTRDFLSKYTKTTSIDLSSLRPSSQYKDLGEYYAELNPLLYHISFQRIAEKEIMDAVETGKLYLFQIYNKDFAKGHHGKPNLHTLYWTGLFSPENLAKTSIKLNGQAELFYRPKSRMKRMAHRLGEKMLNKKLKDQKTPIPDTLYQELYDYVNHRLSHDLSDEARALLPNVITKEVSHEIIKDRRFTSDKFFFHVPITLNYQAANSPSKFNQRVNAYLKEHPETPIIGIDRGERNLIYITVIDSTGKILEQRSLNTIQQFDYQKKLDNREKERVAARQAWSVVGTIKDLKQGYLSQVIHEIVDLMIHYQAVVVLENLNFGFKSKRTGIAEKAVYQQFEKMLIDKLNCLVLKDYPAEKVGGVLNPYQLTDQFTSFAKMGTQSGFLFYVPAPYTSKIDPLTGFVDPFVWKTIKNHESRKHFLEGFDFLHYDVKTGDFILHFKMNRNLSFQRGLPGFMPAWDIVFEKNETQFDAKGTPFIAGKRIVPVIENHRFTGRYRDLYPANELIALLEEKGIVFRDGSNILPKLLENDDSHAIDTMVALIRSVLQMRNSNAATGEDYINSPVRDLNGVCFDSRFQNPEWPMDADANGAYHIALKGQLLLNHLKESKDLKLQNGISNQDWLAYIQELRN

SEQ ID NO: 65 - protein, 1307 aa, Artificial Sequence
  SYNTHESIS
MTQFEGFTNLYQVSKTLRFELIPQGKTLKHIQEQGFIEEDKARNDHYKELKPIIDRIYKTYADQCLQLVQLDWENLSAAIDSYRKEKTEETRNALIEEQATYRNAIHDYFIGRTDNLTDAINKRHAEIYKGLFKAELFNGKVLKQLGTVTTTEHENALLRSFDKFTTYFSGFYENRKNVFSAEDISTAIPHRIVQDNFPKFKENCHIFTRLITAVPSLREHFENVKKAIGIFVSTSIEEVFSFPFYNQLLTQTQIDLYNQLLGGISREAGTEKIKGLNEVLNLAIQKNDETAHIIASLPHRFIPLFKQILSDRNTLSFILEEFKSDEEVIQSFCKYKTLLRNENVLETAEALFNELNSIDLTHIFISHKKLETISSALCDHWDTLRNALYERRISELTGKITKSAKEKVQRSLKHEDINLQEIISAAGKELSEAFKQKTSEILSHAHAALDQPLPTTLKKQEEKEILKSQLDSLLGLYHLLDWFAVDESNEVDPEFSARLVGIKLEMEPSLSFYNKARNYATKKPYSVEKFKLNFQMPTLASGWDVNKEKNNGAILFVKNGLYYLGIMPKQKGRYKALSFEPTEKTSEGFDKMYYDYFPDAAKMIPKCSTQLKAVTAHFQTHTTPILLSNNFIEPLEITKEIYDLNNPEKEPKKFQTAYAKKTGDQKGYREALCKWIDFTRDFLSKYTKTTSIDLSSLRPSSQYKDLGEYYAELNPLLYHISFQRIAEKEIMDAVETGKLYLFQIYNKDFAKGHHGKPNLHTLYWTGLFSPENLAKTSIKLNGQAELFYRPKSRMKRMAHRLGEKMLNKKLKDQKTPIPDTLYQELYDYVNHRLSHDLSDEARALLPNVITKEVSHEIIKDRRFTSDKFFFHVPITLNYQAANSPSKFNQRVNAYLKEHPETPIIGIDRGERNLIYITVIDSTGKILEQRSLNTIQQFDYQKKLDNREKERVAARQAWSVVGTIKDLKQGYLSQVIHEIVDLMIHYQAVVVLENLNFGFKSKRTGIAEKAVYQQFEKMLIDKLNCLVLKDYPAEKVGGVLNPYQLTDQFTSFAKMGTQSGFLFYVPAPYTSKIDPLTGFVDPFVWKTIKNHESRKHFLEGFDFLHYDVKTGDFILHFKMNRNLSFQRGLPGFMPAWDIVFEKNETQFDAKGTPFIAGKRIVPVIENHRFTGRYRDLYPANELIALLEEKGIVFRDGSNILPKLLENDDSHAIDTMVALIRSVLQMRNSNAATGEDYINSPVRDLNGVCFDSRFQNPEWPMDADANGAYHIALKGQLLLNHLKESKDLKLQNGISNQDWLAYIQELRN

SEQ ID NO: 66 - protein, 1307 aa, Artificial Sequence
  SYNTHETIC
MTQFEGFTNLYQVSKTLRFELIPQGKTLKHIQEQGFIEEDKARNDHYKELKPIIDRIYKTYADQCLQLVQLDWENLSAAIDSYRKEKTEETRNALIEEQATYRNAIHDYFIGRTDNLTDAINKRHAEIYKGLFKAELFNGKVLKQLGTVTTTEHENALLRSFDKFTTYFSGFYENRKNVFSAEDISTAIPHRIVQDNFPKFKENCHIFTRLITAVPSLREHFENVKKAIGIFVSTSIEEVFSFPFYNQLLTQTQIDLYNQLLGGISREAGTEKIKGLNEVLNLAIQKNDETAHIIASLPHRFIPLFKQILSDRNTLSFILEEFKSDEEVIQSFCKYKTLLRNENVLETAEALFNELNSIDLTHIFISHKKLETISSALCDHWDTLRNALYERRISELTGKITKSAKEKVQRSLKHEDINLQEIISAAGKELSEAFKQKTSEILSHAHAALDQPLPTTLKKQEEKEILKSQLDSLLGLYHLLDWFAVDESNEVDPEFSARLTRIKLEMEPSLSFYNKARNYATKKPYSVEKFKLNFQMPTLASGWDVNKEKNNGAILFVKNGLYYLGIMPKQKGRYKALSFEPTEKTSEGFDKMYYDYFPDAAKMIPKCSTQLKAVTAHFQTHTTPILLSNNFIEPLEITKEIYDLNNPEKEPKKFQTAYAKKTGDQKGYREALCKWIDFTRDFLSKYTKTTSIDLSSLRPSSQYKDLGEYYAELNPLLYHISFQRIAEKEIMDAVETGKLYLFQIYNKDFAKGHHGKPNLHTLYWTGLFSPENLAKTSIKLNGQAELFYRPKSRMKRMAHRLGEKMLNKKLKDQKTPIPDTLYQELYDYVNHRLSHDLSDEARALLPNVITKEVSHEIIKDRRFTSDKFFFHVPITLNYQAANSPSKFNQRVNAYLKEHPETPIIGIDRGERNLIYITVIDSTGKILEQRSLNTIQQFDYQKKLDNREKERVAARQAWSVVGTIKDLKQGYLSQVIHEIVDLMIHYQAVVVLENLNFGFKSKRTGIAEKAVYQQFEKMLIDKLNCLVLKDYPAEKVGGVLNPYQLTDQFTSFAKMGTQSGFLFYVPAPYTSKIDPLTGFVDPFVWKTIKNHESRKHFLEGFDFLHYDVKTGDFILHFKMNRNLSFQRGLPGFMPAWDIVFEKNETQFDAKGTPFIAGKRIVPVIENHRFTGRYRDLYPANELIALLEEKGIVFRDGSNILPKLLENDDSHAIDTMVALIRSVLQMRNSNAATGEDYINSPVRDLNGVCFDSRFQNPEWPMDADANGAYHIALKGQLLLNHLKESKDLKLQNGISNQDWLAYIQELRN

SEQ ID NO: 67 - protein, 1307 aa, Artificial Sequence
  SYNTHETIC
MTQFEGFTNLYQVSKTLRFELIPQGKTLKHIQEQGFIEEDKARNDHYKELKPIIDRIYKTYADQCLQLVQLDWENLSAAIDSYRKEKTEETRNALIEEQATYRNAIHDYFIGRTDNLTDAINKRHAEIYKGLFKAELFNGKVLKQLGTVTTTEHENALLRSFDKFTTYFSGFYENRKNVFSAEDISTAIPHRIVQDNFPKFKENCHIFTRLITAVPSLREHFENVKKAIGIFVSTSIEEVFSFPFYNQLLTQTQIDLYNQLLGGISREAGTEKIKGLNEVLNLAIQKNDETAHIIASLPHRFIPLFKQILSDRNTLSFILEEFKSDEEVIQSFCKYKTLLRNENVLETAEALFNELNSIDLTHIFISHKKLETISSALCDHWDTLRNALYERRISELTGKITKSAKEKVQRSLKHEDINLQEIISAAGKELSEAFKQKTSEILSHAHAALDQPLPTTLKKQEEKEILKSQLDSLLGLYHLLDWFAVDESNEVDPEFSARLTEIKLEMEPSLSFYNKARNYATKKPYSVEKFKLNFQMPTLASGWDVNKEKNNGAILFVKNGLYYLGIMPKQKGRYKALSFEPTEKTSEGFDKMYYDYFPDAAKMIPKCSTQLKAVTAHFQTHTTPILLSNNFIEPLEITKEIYDLNNPEKEPKKFQTAYAKKTGDQKGYREALCKWIDFTRDFLSKYTKTTSIDLSSLRPSSQYKDLGEYYAELNPLLYHISFQRIAEKEIMDAVETGKLYLFQIYNKDFAKGHHGKPNLHTLYWTGLFSPENLAKTSIKLNGQAELFYRPKSRMKRMAHRLGEKMLNKKLKDQKTPIPDTLYQELYDYVNHRLSHDLSDEARALLPNVITKEVSHEIIKDRRFTSDKFFFHVPITLNYQAANSPSKFNQRVNAYLKEHPETPIIGIDRGERNLIYITVIDSTGKILEQRSLNTIQQFDYQKKLDNREKERVAARQAWSVVGTIKDLKQGYLSQVIHEIVDLMIHYQAVVVLENLNFGFKSKRTGIAEKAVYQQFEKMLIDKLNCLVLKDYPAEKVGGVLNPYQLTDQFTSFAKMGTQSGFLFYVPAPYTSKIDPLTGFVDPFVWKTIKNHESRKHFLEGFDFLHYDVKTGDFILHFKMNRNLSFQRGLPGFMPAWDIVFEKNETQFDAKGTPFIAGKRIVPVIENHRFTGRYRDLYPANELIALLEEKGIVFRDGSNILPKLLENDDSHAIDTMVALIRSVLQMRNSNAATGEDYINSPVRDLNGVCFDSRFQNPEWPMDADANGAYHIALKGQLLLNHLKESKDLKLQNGISNQDWLAYIQELRN

SEQ ID NO: 68 - protein, 1307 aa, Artificial Sequence
  SYNTHETIC
MTQFEGFTNLYQVSKTLRFELIPQGKTLKHIQEQGFIEEDKARNDHYKELKPIIDRIYKTYADQCLQLVQLDWENLSAAIDSYRKEKTEETRNALIEEQATYRNAIHDYFIGRTDNLTDAINKRHAEIYKGLFKAELFNGKVLKQLGTVTTTEHENALLRSFDKFTTYFSGFYENRKNVFSAEDISTAIPHRIVQDNFPKFKENCHIFTRLITAVPSLREHFENVKKAIGIFVSTSIEEVFSFPFYNQLLTQTQIDLYNQLLGGISREAGTEKIKGLNEVLNLAIQKNDETAHIIASLPHRFIPLFKQILSDRNTLSFILEEFKSDEEVIQSFCKYKTLLRNENVLETAEALFNELNSIDLTHIFISHKKLETISSALCDHWDTLRNALYERRISELTGKITKSAKEKVQRSLKHEDINLQEIISAAGKELSEAFKQKTSEILSHAHAALDQPLPTTLKKQEEKEILKSQLDSLLGLYHLLDWFAVDESNEVDPEFSARLTLIKLEMEPSLSFYNKARNYATKKPYSVEKFKLNFQMPTLASGWDVNKEKNNGAILFVKNGLYYLGIMPKQKGRYKALSFEPTEKTSEGFDKMYYDYFPDAAKMIPKCSTQLKAVTAHFQTHTTPILLSNNFIEPLEITKEIYDLNNPEKEPKKFQTAYAKKTGDQKGYREALCKWIDFTRDFLSKYTKTTSIDLSSLRPSSQYKDLGEYYAELNPLLYHISFQRIAEKEIMDAVETGKLYLFQIYNKDFAKGHHGKPNLHTLYWTGLFSPENLAKTSIKLNGQAELFYRPKSRMKRMAHRLGEKMLNKKLKDQKTPIPDTLYQELYDYVNHRLSHDLSDEARALLPNVITKEVSHEIIKDRRFTSDKFFFHVPITLNYQAANSPSKFNQRVNAYLKEHPETPIIGIDRGERNLIYITVIDSTGKILEQRSLNTIQQFDYQKKLDNREKERVAARQAWSVVGTIKDLKQGYLSQVIHEIVDLMIHYQAVVVLENLNFGFKSKRTGIAEKAVYQQFEKMLIDKLNCLVLKDYPAEKVGGVLNPYQLTDQFTSFAKMGTQSGFLFYVPAPYTSKIDPLTGFVDPFVWKTIKNHESRKHFLEGFDFLHYDVKTGDFILHFKMNRNLSFQRGLPGFMPAWDIVFEKNETQFDAKGTPFIAGKRIVPVIENHRFTGRYRDLYPANELIALLEEKGIVFRDGSNILPKLLENDDSHAIDTMVALIRSVLQMRNSNAATGEDYINSPVRDLNGVCFDSRFQNPEWPMDADANGAYHIALKGQLLLNHLKESKDLKLQNGISNQDWLAYIQELRN

SEQ ID NO: 69 - protein, 1307 aa, Artificial Sequence
  SYNTHETIC
MTQFEGFTNLYQVSKTLRFELIPQGKTLKHIQEQGFIEEDKARNDHYKELKPIIDRIYKTYADQCLQLVQLDWENLSAAIDSYRKEKTEETRNALIEEQATYRNAIHDYFIGRTDNLTDAINKRHAEIYKGLFKAELFNGKVLKQLGTVTTTEHENALLRSFDKFTTYFSGFYENRKNVFSAEDISTAIPHRIVQDNFPKFKENCHIFTRLITAVPSLREHFENVKKAIGIFVSTSIEEVFSFPFYNQLLTQTQIDLYNQLLGGISREAGTEKIKGLNEVLNLAIQKNDETAHIIASLPHRFIPLFKQILSDRNTLSFILEEFKSDEEVIQSFCKYKTLLRNENVLETAEALFNELNSIDLTHIFISHKKLETISSALCDHWDTLRNALYERRISELTGKITKSAKEKVQRSLKHEDINLQEIISAAGKELSEAFKQKTSEILSHAHAALDQPLPTTLKKQEEKEILKSQLDSLLGLYHLLDWFAVDESNEVDPEFSARLTSIKLEMEPSLSFYNKARNYATKKPYSVEKFKLNFQMPTLASGWDVNKEKNNGAILFVKNGLYYLGIMPKQKGRYKALSFEPTEKTSEGFDKMYYDYFPDAAKMIPKCSTQLKAVTAHFQTHTTPILLSNNFIEPLEITKEIYDLNNPEKEPKKFQTAYAKKTGDQKGYREALCKWIDFTRDFLSKYTKTTSIDLSSLRPSSQYKDLGEYYAELNPLLYHISFQRIAEKEIMDAVETGKLYLFQIYNKDFAKGHHGKPNLHTLYWTGLFSPENLAKTSIKLNGQAELFYRPKSRMKRMAHRLGEKMLNKKLKDQKTPIPDTLYQELYDYVNHRLSHDLSDEARALLPNVITKEVSHEIIKDRRFTSDKFFFHVPITLNYQAANSPSKFNQRVNAYLKEHPETPIIGIDRGERNLIYITVIDSTGKILEQRSLNTIQQFDYQKKLDNREKERVAARQAWSVVGTIKDLKQGYLSQVIHEIVDLMIHYQAVVVLENLNFGFKSKRTGIAEKAVYQQFEKMLIDKLNCLVLKDYPAEKVGGVLNPYQLTDQFTSFAKMGTQSGFLFYVPAPYTSKIDPLTGFVDPFVWKTIKNHESRKHFLEGFDFLHYDVKTGDFILHFKMNRNLSFQRGLPGFMPAWDIVFEKNETQFDAKGTPFIAGKRIVPVIENHRFTGRYRDLYPANELIALLEEKGIVFRDGSNILPKLLENDDSHAIDTMVALIRSVLQMRNSNAATGEDYINSPVRDLNGVCFDSRFQNPEWPMDADANGAYHIALKGQLLLNHLKESKDLKLQNGISNQDWLAYIQELRN

SEQ ID NO: 70 - protein, 1307 aa, Artificial Sequence
  SYNTHETIC
MTQFEGFTNLYQVSKTLRFELIPQGKTLKHIQEQGFIEEDKARNDHYKELKPIIDRIYKTYADQCLQLVQLDWENLSAAIDSYRKEKTEETRNALIEEQATYRNAIHDYFIGRTDNLTDAINKRHAEIYKGLFKAELFNGKVLKQLGTVTTTEHENALLRSFDKFTTYFSGFYENRKNVFSAEDISTAIPHRIVQDNFPKFKENCHIFTRLITAVPSLREHFENVKKAIGIFVSTSIEEVFSFPFYNQLLTQTQIDLYNQLLGGISREAGTEKIKGLNEVLNLAIQKNDETAHIIASLPHRFIPLFKQILSDRNTLSFILEEFKSDEEVIQSFCKYKTLLRNENVLETAEALFNELNSIDLTHIFISHKKLETISSALCDHWDTLRNALYERRISELTGKITKSAKEKVQRSLKHEDINLQEIISAAGKELSEAFKQKTSEILSHAHAALDQPLPTTLKKQEEKEILKSQLDSLLGLYHLLDWFAVDESNEVDPEFSARLTWIKLEMEPSLSFYNKARNYATKKPYSVEKFKLNFQMPTLASGWDVNKEKNNGAILFVKNGLYYLGIMPKQKGRYKALSFEPTEKTSEGFDKMYYDYFPDAAKMIPKCSTQLKAVTAHFQTHTTPILLSNNFIEPLEITKEIYDLNNPEKEPKKFQTAYAKKTGDQKGYREALCKWIDFTRDFLSKYTKTTSIDLSSLRPSSQYKDLGEYYAELNPLLYHISFQRIAEKEIMDAVETGKLYLFQIYNKDFAKGHHGKPNLHTLYWTGLFSPENLAKTSIKLNGQAELFYRPKSRMKRMAHRLGEKMLNKKLKDQKTPIPDTLYQELYDYVNHRLSHDLSDEARALLPNVITKEVSHEIIKDRRFTSDKFFFHVPITLNYQAANSPSKFNQRVNAYLKEHPETPIIGIDRGERNLIYITVIDSTGKILEQRSLNTIQQFDYQKKLDNREKERVAARQAWSVVGTIKDLKQGYLSQVIHEIVDLMIHYQAVVVLENLNFGFKSKRTGIAEKAVYQQFEKMLIDKLNCLVLKDYPAEKVGGVLNPYQLTDQFTSFAKMGTQSGFLFYVPAPYTSKIDPLTGFVDPFVWKTIKNHESRKHFLEGFDFLHYDVKTGDFILHFKMNRNLSFQRGLPGFMPAWDIVFEKNETQFDAKGTPFIAGKRIVPVIENHRFTGRYRDLYPANELIALLEEKGIVFRDGSNILPKLLENDDSHAIDTMVALIRSVLQMRNSNAATGEDYINSPVRDLNGVCFDSRFQNPEWPMDADANGAYHIALKGQLLLNHLKESKDLKLQNGISNQDWLAYIQELRN

SEQ ID NO: 71 - protein, 1307 aa, Artificial Sequence
  SYNTHETIC
MTQFEGFTNLYQVSKTLRFELIPQGKTLKHIQEQGFIEEDKARNDHYKELKPIIDRIYKTYADQCLQLVQLDWENLSAAIDSYRKEKTEETRNALIEEQATYRNAIHDYFIGRTDNLTDAINKRHAEIYKGLFKAELFNGKVLKQLGTVTTTEHENALLRSFDKFTTYFSGFYENRKNVFSAEDISTAIPHRIVQDNFPKFKENCHIFTRLITAVPSLREHFENVKKAIGIFVSTSIEEVFSFPFYNQLLTQTQIDLYNQLLGGISREAGTEKIKGLNEVLNLAIQKNDETAHIIASLPHRFIPLFKQILSDRNTLSFILEEFKSDEEVIQSFCKYKTLLRNENVLETAEALFNELNSIDLTHIFISHKKLETISSALCDHWDTLRNALYERRISELTGKITKSAKEKVQRSLKHEDINLQEIISAAGKELSEAFKQKTSEILSHAHAALDQPLPTTLKKQEEKEILKSQLDSLLGLYHLLDWFAVDESNEVDPEFSARLTVIKLEMEPSLSFYNKARNYATKKPYSVEKFKLNFQMPTLASGWDVNKEKNNGAILFVKNGLYYLGIMPKQKGRYKALSFEPTEKTSEGFDKMYYDYFPDAAKMIPKCSTQLKAVTAHFQTHTTPILLSNNFIEPLEITKEIYDLNNPEKEPKKFQTAYAKKTGDQKGYREALCKWIDFTRDFLSKYTKTTSIDLSSLRPSSQYKDLGEYYAELNPLLYHISFQRIAEKEIMDAVETGKLYLFQIYNKDFAKGHHGKPNLHTLYWTGLFSPENLAKTSIKLNGQAELFYRPKSRMKRMAHRLGEKMLNKKLKDQKTPIPDTLYQELYDYVNHRLSHDLSDEARALLPNVITKEVSHEIIKDRRFTSDKFFFHVPITLNYQAANSPSKFNQRVNAYLKEHPETPIIGIDRGERNLIYITVIDSTGKILEQRSLNTIQQFDYQKKLDNREKERVAARQAWSVVGTIKDLKQGYLSQVIHEIVDLMIHYQAVVVLENLNFGFKSKRTGIAEKAVYQQFEKMLIDKLNCLVLKDYPAEKVGGVLNPYQLTDQFTSFAKMGTQSGFLFYVPAPYTSKIDPLTGFVDPFVWKTIKNHESRKHFLEGFDFLHYDVKTGDFILHFKMNRNLSFQRGLPGFMPAWDIVFEKNETQFDAKGTPFIAGKRIVPVIENHRFTGRYRDLYPANELIALLEEKGIVFRDGSNILPKLLENDDSHAIDTMVALIRSVLQMRNSNAATGEDYINSPVRDLNGVCFDSRFQNPEWPMDADANGAYHIALKGQLLLNHLKESKDLKLQNGISNQDWLAYIQELRN

SEQ ID NO: 72 - protein, 1307 aa, Artificial Sequence
  SYNTHETIC
MTQFEGFTNLYQVSKTLRFELIPQGKTLKHIQEQGFIEEDKARNDHYKELKPIIDRIYKTYADQCLQLVQLDWENLSAAIDSYRKEKTEETRNALIEEQATYRNAIHDYFIGRTDNLTDAINKRHAEIYKGLFKAELFNGKVLKQLGTVTTTEHENALLRSFDKFTTYFSGFYENRKNVFSAEDISTAIPHRIVQDNFPKFKENCHIFTRLITAVPSLREHFENVKKAIGIFVSTSIEEVFSFPFYNQLLTQTQIDLYNQLLGGISREAGTEKIKGLNEVLNLAIQKNDETAHIIASLPHRFIPLFKQILSDRNTLSFILEEFKSDEEVIQSFCKYKTLLRNENVLETAEALFNELNSIDLTHIFISHKKLETISSALCDHWDTLRNALYERRISELTGKITKSAKEKVQRSLKHEDINLQEIISAAGKELSEAFKQKTSEILSHAHAALDQPLPTTLKKQEEKEILKSQLDSLLGLYHLLDWFAVDESNEVDPEFSARLTGIKAEMEPSLSFYNKARNYATKKPYSVEKFKLNFQMPTLASGWDVNKEKNNGAILFVKNGLYYLGIMPKQKGRYKALSFEPTEKTSEGFDKMYYDYFPDAAKMIPKCSTQLKAVTAHFQTHTTPILLSNNFIEPLEITKEIYDLNNPEKEPKKFQTAYAKKTGDQKGYREALCKWIDFTRDFLSKYTKTTSIDLSSLRPSSQYKDLGEYYAELNPLLYHISFQRIAEKEIMDAVETGKLYLFQIYNKDFAKGHHGKPNLHTLYWTGLFSPENLAKTSIKLNGQAELFYRPKSRMKRMAHRLGEKMLNKKLKDQKTPIPDTLYQELYDYVNHRLSHDLSDEARALLPNVITKEVSHEIIKDRRFTSDKFFFHVPITLNYQAANSPSKFNQRVNAYLKEHPETPIIGIDRGERNLIYITVIDSTGKILEQRSLNTIQQFDYQKKLDNREKERVAARQAWSVVGTIKDLKQGYLSQVIHEIVDLMIHYQAVVVLENLNFGFKSKRTGIAEKAVYQQFEKMLIDKLNCLVLKDYPAEKVGGVLNPYQLTDQFTSFAKMGTQSGFLFYVPAPYTSKIDPLTGFVDPFVWKTIKNHESRKHFLEGFDFLHYDVKTGDFILHFKMNRNLSFQRGLPGFMPAWDIVFEKNETQFDAKGTPFIAGKRIVPVIENHRFTGRYRDLYPANELIALLEEKGIVFRDGSNILPKLLENDDSHAIDTMVALIRSVLQMRNSNAATGEDYINSPVRDLNGVCFDSRFQNPEWPMDADANGAYHIALKGQLLLNHLKESKDLKLQNGISNQDWLAYIQELRN

SEQ ID NO: 73 - protein, 1307 aa, Artificial Sequence
  SYNTHETIC
MTQFEGFTNLYQVSKTLRFELIPQGKTLKHIQEQGFIEEDKARNDHYKELKPIIDRIYKTYADQCLQLVQLDWENLSAAIDSYRKEKTEETRNALIEEQATYRNAIHDYFIGRTDNLTDAINKRHAEIYKGLFKAELFNGKVLKQLGTVTTTEHENALLRSFDKFTTYFSGFYENRKNVFSAEDISTAIPHRIVQDNFPKFKENCHIFTRLITAVPSLREHFENVKKAIGIFVSTSIEEVFSFPFYNQLLTQTQIDLYNQLLGGISREAGTEKIKGLNEVLNLAIQKNDETAHIIASLPHRFIPLFKQILSDRNTLSFILEEFKSDEEVIQSFCKYKTLLRNENVLETAEALFNELNSIDLTHIFISHKKLETISSALCDHWDTLRNALYERRISELTGKITKSAKEKVQRSLKHEDINLQEIISAAGKELSEAFKQKTSEILSHAHAALDQPLPTTLKKQEEKEILKSQLDSLLGLYHLLDWFAVDESNEVDPEFSARLTGIKREMEPSLSFYNKARNYATKKPYSVEKFKLNFQMPTLASGWDVNKEKNNGAILFVKNGLYYLGIMPKQKGRYKALSFEPTEKTSEGFDKMYYDYFPDAAKMIPKCSTQLKAVTAHFQTHTTPILLSNNFIEPLEITKEIYDLNNPEKEPKKFQTAYAKKTGDQKGYREALCKWIDFTRDFLSKYTKTTSIDLSSLRPSSQYKDLGEYYAELNPLLYHISFQRIAEKEIMDAVETGKLYLFQIYNKDFAKGHHGKPNLHTLYWTGLFSPENLAKTSIKLNGQAELFYRPKSRMKRMAHRLGEKMLNKKLKDQKTPIPDTLYQELYDYVNHRLSHDLSDEARALLPNVITKEVSHEIIKDRRFTSDKFFFHVPITLNYQAANSPSKFNQRVNAYLKEHPETPIIGIDRGERNLIYITVIDSTGKILEQRSLNTIQQFDYQKKLDNREKERVAARQAWSVVGTIKDLKQGYLSQVIHEIVDLMIHYQAVVVLENLNFGFKSKRTGIAEKAVYQQFEKMLIDKLNCLVLKDYPAEKVGGVLNPYQLTDQFTSFAKMGTQSGFLFYVPAPYTSKIDPLTGFVDPFVWKTIKNHESRKHFLEGFDFLHYDVKTGDFILHFKMNRNLSFQRGLPGFMPAWDIVFEKNETQFDAKGTPFIAGKRIVPVIENHRFTGRYRDLYPANELIALLEEKGIVFRDGSNILPKLLENDDSHAIDTMVALIRSVLQMRNSNAATGEDYINSPVRDLNGVCFDSRFQNPEWPMDADANGAYHIALKGQLLLNHLKESKDLKLQNGISNQDWLAYIQELRN

SEQ ID NO: 74 - protein, 1307 aa, Artificial Sequence
  SYNTHETIC
MTQFEGFTNLYQVSKTLRFELIPQGKTLKHIQEQGFIEEDKARNDHYKELKPIIDRIYKTYADQCLQLVQLDWENLSAAIDSYRKEKTEETRNALIEEQATYRNAIHDYFIGRTDNLTDAINKRHAEIYKGLFKAELFNGKVLKQLGTVTTTEHENALLRSFDKFTTYFSGFYENRKNVFSAEDISTAIPHRIVQDNFPKFKENCHIFTRLITAVPSLREHFENVKKAIGIFVSTSIEEVFSFPFYNQLLTQTQIDLYNQLLGGISREAGTEKIKGLNEVLNLAIQKNDETAHIIASLPHRFIPLFKQILSDRNTLSFILEEFKSDEEVIQSFCKYKTLLRNENVLETAEALFNELNSIDLTHIFISHKKLETISSALCDHWDTLRNALYERRISELTGKITKSAKEKVQRSLKHEDINLQEIISAAGKELSEAFKQKTSEILSHAHAALDQPLPTTLKKQEEKEILKSQLDSLLGLYHLLDWFAVDESNEVDPEFSARLTGIKQEMEPSLSFYNKARNYATKKPYSVEKFKLNFQMPTLASGWDVNKEKNNGAILFVKNGLYYLGIMPKQKGRYKALSFEPTEKTSEGFDKMYYDYFPDAAKMIPKCSTQLKAVTAHFQTHTTPILLSNNFIEPLEITKEIYDLNNPEKEPKKFQTAYAKKTGDQKGYREALCKWIDFTRDFLSKYTKTTSIDLSSLRPSSQYKDLGEYYAELNPLLYHISFQRIAEKEIMDAVETGKLYLFQIYNKDFAKGHHGKPNLHTLYWTGLFSPENLAKTSIKLNGQAELFYRPKSRMKRMAHRLGEKMLNKKLKDQKTPIPDTLYQELYDYVNHRLSHDLSDEARALLPNVITKEVSHEIIKDRRFTSDKFFFHVPITLNYQAANSPSKFNQRVNAYLKEHPETPIIGIDRGERNLIYITVIDSTGKILEQRSLNTIQQFDYQKKLDNREKERVAARQAWSVVGTIKDLKQGYLSQVIHEIVDLMIHYQAVVVLENLNFGFKSKRTGIAEKAVYQQFEKMLIDKLNCLVLKDYPAEKVGGVLNPYQLTDQFTSFAKMGTQSGFLFYVPAPYTSKIDPLTGFVDPFVWKTIKNHESRKHFLEGFDFLHYDVKTGDFILHFKMNRNLSFQRGLPGFMPAWDIVFEKNETQFDAKGTPFIAGKRIVPVIENHRFTGRYRDLYPANELIALLEEKGIVFRDGSNILPKLLENDDSHAIDTMVALIRSVLQMRNSNAATGEDYINSPVRDLNGVCFDSRFQNPEWPMDADANGAYHIALKGQLLLNHLKESKDLKLQNGISNQDWLAYIQELRN

SEQ ID NO: 75 - protein, 1307 aa, Artificial Sequence
  SYNTHETIC
MTQFEGFTNLYQVSKTLRFELIPQGKTLKHIQEQGFIEEDKARNDHYKELKPIIDRIYKTYADQCLQLVQLDWENLSAAIDSYRKEKTEETRNALIEEQATYRNAIHDYFIGRTDNLTDAINKRHAEIYKGLFKAELFNGKVLKQLGTVTTTEHENALLRSFDKFTTYFSGFYENRKNVFSAEDISTAIPHRIVQDNFPKFKENCHIFTRLITAVPSLREHFENVKKAIGIFVSTSIEEVFSFPFYNQLLTQTQIDLYNQLLGGISREAGTEKIKGLNEVLNLAIQKNDETAHIIASLPHRFIPLFKQILSDRNTLSFILEEFKSDEEVIQSFCKYKTLLRNENVLETAEALFNELNSIDLTHIFISHKKLETISSALCDHWDTLRNALYERRISELTGKITKSAKEKVQRSLKHEDINLQEIISAAGKELSEAFKQKTSEILSHAHAALDQPLPTTLKKQEEKEILKSQLDSLLGLYHLLDWFAVDESNEVDPEFSARLTGIKEEMEPSLSFYNKARNYATKKPYSVEKFKLNFQMPTLASGWDVNKEKNNGAILFVKNGLYYLGIMPKQKGRYKALSFEPTEKTSEGFDKMYYDYFPDAAKMIPKCSTQLKAVTAHFQTHTTPILLSNNFIEPLEITKEIYDLNNPEKEPKKFQTAYAKKTGDQKGYREALCKWIDFTRDFLSKYTKTTSIDLSSLRPSSQYKDLGEYYAELNPLLYHISFQRIAEKEIMDAVETGKLYLFQIYNKDFAKGHHGKPNLHTLYWTGLFSPENLAKTSIKLNGQAELFYRPKSRMKRMAHRLGEKMLNKKLKDQKTPIPDTLYQELYDYVNHRLSHDLSDEARALLPNVITKEVSHEIIKDRRFTSDKFFFHVPITLNYQAANSPSKFNQRVNAYLKEHPETPIIGIDRGERNLIYITVIDSTGKILEQRSLNTIQQFDYQKKLDNREKERVAARQAWSVVGTIKDLKQGYLSQVIHEIVDLMIHYQAVVVLENLNFGFKSKRTGIAEKAVYQQFEKMLIDKLNCLVLKDYPAEKVGGVLNPYQLTDQFTSFAKMGTQSGFLFYVPAPYTSKIDPLTGFVDPFVWKTIKNHESRKHFLEGFDFLHYDVKTGDFILHFKMNRNLSFQRGLPGFMPAWDIVFEKNETQFDAKGTPFIAGKRIVPVIENHRFTGRYRDLYPANELIALLEEKGIVFRDGSNILPKLLENDDSHAIDTMVALIRSVLQMRNSNAATGEDYINSPVRDLNGVCFDSRFQNPEWPMDADANGAYHIALKGQLLLNHLKESKDLKLQNGISNQDWLAYIQELRN

SEQ ID NO: 76 - protein, 1307 aa, Artificial Sequence
  SYNTHETIC
MTQFEGFTNLYQVSKTLRFELIPQGKTLKHIQEQGFIEEDKARNDHYKELKPIIDRIYKTYADQCLQLVQLDWENLSAAIDSYRKEKTEETRNALIEEQATYRNAIHDYFIGRTDNLTDAINKRHAEIYKGLFKAELFNGKVLKQLGTVTTTEHENALLRSFDKFTTYFSGFYENRKNVFSAEDISTAIPHRIVQDNFPKFKENCHIFTRLITAVPSLREHFENVKKAIGIFVSTSIEEVFSFPFYNQLLTQTQIDLYNQLLGGISREAGTEKIKGLNEVLNLAIQKNDETAHIIASLPHRFIPLFKQILSDRNTLSFILEEFKSDEEVIQSFCKYKTLLRNENVLETAEALFNELNSIDLTHIFISHKKLETISSALCDHWDTLRNALYERRISELTGKITKSAKEKVQRSLKHEDINLQEIISAAGKELSEAFKQKTSEILSHAHAALDQPLPTTLKKQEEKEILKSQLDSLLGLYHLLDWFAVDESNEVDPEFSARLTGIKGEMEPSLSFYNKARNYATKKPYSVEKFKLNFQMPTLASGWDVNKEKNNGAILFVKNGLYYLGIMPKQKGRYKALSFEPTEKTSEGFDKMYYDYFPDAAKMIPKCSTQLKAVTAHFQTHTTPILLSNNFIEPLEITKEIYDLNNPEKEPKKFQTAYAKKTGDQKGYREALCKWIDFTRDFLSKYTKTTSIDLSSLRPSSQYKDLGEYYAELNPLLYHISFQRIAEKEIMDAVETGKLYLFQIYNKDFAKGHHGKPNLHTLYWTGLFSPENLAKTSIKLNGQAELFYRPKSRMKRMAHRLGEKMLNKKLKDQKTPIPDTLYQELYDYVNHRLSHDLSDEARALLPNVITKEVSHEIIKDRRFTSDKFFFHVPITLNYQAANSPSKFNQRVNAYLKEHPETPIIGIDRGERNLIYITVIDSTGKILEQRSLNTIQQFDYQKKLDNREKERVAARQAWSVVGTIKDLKQGYLSQVIHEIVDLMIHYQAVVVLENLNFGFKSKRTGIAEKAVYQQFEKMLIDKLNCLVLKDYPAEKVGGVLNPYQLTDQFTSFAKMGTQSGFLFYVPAPYTSKIDPLTGFVDPFVWKTIKNHESRKHFLEGFDFLHYDVKTGDFILHFKMNRNLSFQRGLPGFMPAWDIVFEKNETQFDAKGTPFIAGKRIVPVIENHRFTGRYRDLYPANELIALLEEKGIVFRDGSNILPKLLENDDSHAIDTMVALIRSVLQMRNSNAATGEDYINSPVRDLNGVCFDSRFQNPEWPMDADANGAYHIALKGQLLLNHLKESKDLKLQNGISNQDWLAYIQELRN

SEQ ID NO: 77 - protein, 1307 aa, Artificial Sequence
  SYNTHETIC
MTQFEGFTNLYQVSKTLRFELIPQGKTLKHIQEQGFIEEDKARNDHYKELKPIIDRIYKTYADQCLQLVQLDWENLSAAIDSYRKEKTEETRNALIEEQATYRNAIHDYFIGRTDNLTDAINKRHAEIYKGLFKAELFNGKVLKQLGTVTTTEHENALLRSFDKFTTYFSGFYENRKNVFSAEDISTAIPHRIVQDNFPKFKENCHIFTRLITAVPSLREHFENVKKAIGIFVSTSIEEVFSFPFYNQLLTQTQIDLYNQLLGGISREAGTEKIKGLNEVLNLAIQKNDETAHIIASLPHRFIPLFKQILSDRNTLSFILEEFKSDEEVIQSFCKYKTLLRNENVLETAEALFNELNSIDLTHIFISHKKLETISSALCDHWDTLRNALYERRISELTGKITKSAKEKVQRSLKHEDINLQEIISAAGKELSEAFKQKTSEILSHAHAALDQPLPTTLKKQEEKEILKSQLDSLLGLYHLLDWFAVDESNEVDPEFSARLTGIKHEMEPSLSFYNKARNYATKKPYSVEKFKLNFQMPTLASGWDVNKEKNNGAILFVKNGLYYLGIMPKQKGRYKALSFEPTEKTSEGFDKMYYDYFPDAAKMIPKCSTQLKAVTAHFQTHTTPILLSNNFIEPLEITKEIYDLNNPEKEPKKFQTAYAKKTGDQKGYREALCKWIDFTRDFLSKYTKTTSIDLSSLRPSSQYKDLGEYYAELNPLLYHISFQRIAEKEIMDAVETGKLYLFQIYNKDFAKGHHGKPNLHTLYWTGLFSPENLAKTSIKLNGQAELFYRPKSRMKRMAHRLGEKMLNKKLKDQKTPIPDTLYQELYDYVNHRLSHDLSDEARALLPNVITKEVSHEIIKDRRFTSDKFFFHVPITLNYQAANSPSKFNQRVNAYLKEHPETPIIGIDRGERNLIYITVIDSTGKILEQRSLNTIQQFDYQKKLDNREKERVAARQAWSVVGTIKDLKQGYLSQVIHEIVDLMIHYQAVVVLENLNFGFKSKRTGIAEKAVYQQFEKMLIDKLNCLVLKDYPAEKVGGVLNPYQLTDQFTSFAKMGTQSGFLFYVPAPYTSKIDPLTGFVDPFVWKTIKNHESRKHFLEGFDFLHYDVKTGDFILHFKMNRNLSFQRGLPGFMPAWDIVFEKNETQFDAKGTPFIAGKRIVPVIENHRFTGRYRDLYPANELIALLEEKGIVFRDGSNILPKLLENDDSHAIDTMVALIRSVLQMRNSNAATGEDYINSPVRDLNGVCFDSRFQNPEWPMDADANGAYHIALKGQLLLNHLKESKDLKLQNGISNQDWLAYIQELRN

SEQ ID NO: 78 - protein, 1307 aa, Artificial Sequence
  SYNTHETIC
MTQFEGFTNLYQVSKTLRFELIPQGKTLKHIQEQGFIEEDKARNDHYKELKPIIDRIYKTYADQCLQLVQLDWENLSAAIDSYRKEKTEETRNALIEEQATYRNAIHDYFIGRTDNLTDAINKRHAEIYKGLFKAELFNGKVLKQLGTVTTTEHENALLRSFDKFTTYFSGFYENRKNVFSAEDISTAIPHRIVQDNFPKFKENCHIFTRLITAVPSLREHFENVKKAIGIFVSTSIEEVFSFPFYNQLLTQTQIDLYNQLLGGISREAGTEKIKGLNEVLNLAIQKNDETAHIIASLPHRFIPLFKQILSDRNTLSFILEEFKSDEEVIQSFCKYKTLLRNENVLETAEALFNELNSIDLTHIFISHKKLETISSALCDHWDTLRNALYERRISELTGKITKSAKEKVQRSLKHEDINLQEIISAAGKELSEAFKQKTSEILSHAHAALDQPLPTTLKKQEEKEILKSQLDSLLGLYHLLDWFAVDESNEVDPEFSARLTGIKKEMEPSLSFYNKARNYATKKPYSVEKFKLNFQMPTLASGWDVNKEKNNGAILFVKNGLYYLGIMPKQKGRYKALSFEPTEKTSEGFDKMYYDYFPDAAKMIPKCSTQLKAVTAHFQTHTTPILLSNNFIEPLEITKEIYDLNNPEKEPKKFQTAYAKKTGDQKGYREALCKWIDFTRDFLSKYTKTTSIDLSSLRPSSQYKDLGEYYAELNPLLYHISFQRIAEKEIMDAVETGKLYLFQIYNKDFAKGHHGKPNLHTLYWTGLFSPENLAKTSIKLNGQAELFYRPKSRMKRMAHRLGEKMLNKKLKDQKTPIPDTLYQELYDYVNHRLSHDLSDEARALLPNVITKEVSHEIIKDRRFTSDKFFFHVPITLNYQAANSPSKFNQRVNAYLKEHPETPIIGIDRGERNLIYITVIDSTGKILEQRSLNTIQQFDYQKKLDNREKERVAARQAWSVVGTIKDLKQGYLSQVIHEIVDLMIHYQAVVVLENLNFGFKSKRTGIAEKAVYQQFEKMLIDKLNCLVLKDYPAEKVGGVLNPYQLTDQFTSFAKMGTQSGFLFYVPAPYTSKIDPLTGFVDPFVWKTIKNHESRKHFLEGFDFLHYDVKTGDFILHFKMNRNLSFQRGLPGFMPAWDIVFEKNETQFDAKGTPFIAGKRIVPVIENHRFTGRYRDLYPANELIALLEEKGIVFRDGSNILPKLLENDDSHAIDTMVALIRSVLQMRNSNAATGEDYINSPVRDLNGVCFDSRFQNPEWPMDADANGAYHIALKGQLLLNHLKESKDLKLQNGISNQDWLAYIQELRN

SEQ ID NO: 79 - protein, 1307 aa, Artificial Sequence
  SYNTHETIC
MTQFEGFTNLYQVSKTLRFELIPQGKTLKHIQEQGFIEEDKARNDHYKELKPIIDRIYKTYADQCLQLVQLDWENLSAAIDSYRKEKTEETRNALIEEQATYRNAIHDYFIGRTDNLTDAINKRHAEIYKGLFKAELFNGKVLKQLGTVTTTEHENALLRSFDKFTTYFSGFYENRKNVFSAEDISTAIPHRIVQDNFPKFKENCHIFTRLITAVPSLREHFENVKKAIGIFVSTSIEEVFSFPFYNQLLTQTQIDLYNQLLGGISREAGTEKIKGLNEVLNLAIQKNDETAHIIASLPHRFIPLFKQILSDRNTLSFILEEFKSDEEVIQSFCKYKTLLRNENVLETAEALFNELNSIDLTHIFISHKKLETISSALCDHWDTLRNALYERRISELTGKITKSAKEKVQRSLKHEDINLQEIISAAGKELSEAFKQKTSEILSHAHAALDQPLPTTLKKQEEKEILKSQLDSLLGLYHLLDWFAVDESNEVDPEFSARLTGIKSEMEPSLSFYNKARNYATKKPYSVEKFKLNFQMPTLASGWDVNKEKNNGAILFVKNGLYYLGIMPKQKGRYKALSFEPTEKTSEGFDKMYYDYFPDAAKMIPKCSTQLKAVTAHFQTHTTPILLSNNFIEPLEITKEIYDLNNPEKEPKKFQTAYAKKTGDQKGYREALCKWIDFTRDFLSKYTKTTSIDLSSLRPSSQYKDLGEYYAELNPLLYHISFQRIAEKEIMDAVETGKLYLFQIYNKDFAKGHHGKPNLHTLYWTGLFSPENLAKTSIKLNGQAELFYRPKSRMKRMAHRLGEKMLNKKLKDQKTPIPDTLYQELYDYVNHRLSHDLSDEARALLPNVITKEVSHEIIKDRRFTSDKFFFHVPITLNYQAANSPSKFNQRVNAYLKEHPETPIIGIDRGERNLIYITVIDSTGKILEQRSLNTIQQFDYQKKLDNREKERVAARQAWSVVGTIKDLKQGYLSQVIHEIVDLMIHYQAVVVLENLNFGFKSKRTGIAEKAVYQQFEKMLIDKLNCLVLKDYPAEKVGGVLNPYQLTDQFTSFAKMGTQSGFLFYVPAPYTSKIDPLTGFVDPFVWKTIKNHESRKHFLEGFDFLHYDVKTGDFILHFKMNRNLSFQRGLPGFMPAWDIVFEKNETQFDAKGTPFIAGKRIVPVIENHRFTGRYRDLYPANELIALLEEKGIVFRDGSNILPKLLENDDSHAIDTMVALIRSVLQMRNSNAATGEDYINSPVRDLNGVCFDSRFQNPEWPMDADANGAYHIALKGQLLLNHLKESKDLKLQNGISNQDWLAYIQELRN

SEQ ID NO: 80 - protein, 1307 aa, Artificial Sequence
  SYNTHETIC
MTQFEGFTNLYQVSKTLRFELIPQGKTLKHIQEQGFIEEDKARNDHYKELKPIIDRIYKTYADQCLQLVQLDWENLSAAIDSYRKEKTEETRNALIEEQATYRNAIHDYFIGRTDNLTDAINKRHAEIYKGLFKAELFNGKVLKQLGTVTTTEHENALLRSFDKFTTYFSGFYENRKNVFSAEDISTAIPHRIVQDNFPKFKENCHIFTRLITAVPSLREHFENVKKAIGIFVSTSIEEVFSFPFYNQLLTQTQIDLYNQLLGGISREAGTEKIKGLNEVLNLAIQKNDETAHIIASLPHRFIPLFKQILSDRNTLSFILEEFKSDEEVIQSFCKYKTLLRNENVLETAEALFNELNSIDLTHIFISHKKLETISSALCDHWDTLRNALYERRISELTGKITKSAKEKVQRSLKHEDINLQEIISAAGKELSEAFKQKTSEILSHAHAALDQPLPTTLKKQEEKEILKSQLDSLLGLYHLLDWFAVDESNEVDPEFSARLTGIKLAMEPSLSFYNKARNYATKKPYSVEKFKLNFQMPTLASGWDVNKEKNNGAILFVKNGLYYLGIMPKQKGRYKALSFEPTEKTSEGFDKMYYDYFPDAAKMIPKCSTQLKAVTAHFQTHTTPILLSNNFIEPLEITKEIYDLNNPEKEPKKFQTAYAKKTGDQKGYREALCKWIDFTRDFLSKYTKTTSIDLSSLRPSSQYKDLGEYYAELNPLLYHISFQRIAEKEIMDAVETGKLYLFQIYNKDFAKGHHGKPNLHTLYWTGLFSPENLAKTSIKLNGQAELFYRPKSRMKRMAHRLGEKMLNKKLKDQKTPIPDTLYQELYDYVNHRLSHDLSDEARALLPNVITKEVSHEIIKDRRFTSDKFFFHVPITLNYQAANSPSKFNQRVNAYLKEHPETPIIGIDRGERNLIYITVIDSTGKILEQRSLNTIQQFDYQKKLDNREKERVAARQAWSVVGTIKDLKQGYLSQVIHEIVDLMIHYQAVVVLENLNFGFKSKRTGIAEKAVYQQFEKMLIDKLNCLVLKDYPAEKVGGVLNPYQLTDQFTSFAKMGTQSGFLFYVPAPYTSKIDPLTGFVDPFVWKTIKNHESRKHFLEGFDFLHYDVKTGDFILHFKMNRNLSFQRGLPGFMPAWDIVFEKNETQFDAKGTPFIAGKRIVPVIENHRFTGRYRDLYPANELIALLEEKGIVFRDGSNILPKLLENDDSHAIDTMVALIRSVLQMRNSNAATGEDYINSPVRDLNGVCFDSRFQNPEWPMDADANGAYHIALKGQLLLNHLKESKDLKLQNGISNQDWLAYIQELRN

SEQ ID NO: 81 - protein, 1307 aa, Artificial Sequence
  SYNTHETIC
MTQFEGFTNLYQVSKTLRFELIPQGKTLKHIQEQGFIEEDKARNDHYKELKPIIDRIYKTYADQCLQLVQLDWENLSAAIDSYRKEKTEETRNALIEEQATYRNAIHDYFIGRTDNLTDAINKRHAEIYKGLFKAELFNGKVLKQLGTVTTTEHENALLRSFDKFTTYFSGFYENRKNVFSAEDISTAIPHRIVQDNFPKFKENCHIFTRLITAVPSLREHFENVKKAIGIFVSTSIEEVFSFPFYNQLLTQTQIDLYNQLLGGISREAGTEKIKGLNEVLNLAIQKNDETAHIIASLPHRFIPLFKQILSDRNTLSFILEEFKSDEEVIQSFCKYKTLLRNENVLETAEALFNELNSIDLTHIFISHKKLETISSALCDHWDTLRNALYERRISELTGKITKSAKEKVQRSLKHEDINLQEIISAAGKELSEAFKQKTSEILSHAHAALDQPLPTTLKKQEEKEILKSQLDSLLGLYHLLDWFAVDESNEVDPEFSARLTGIKLRMEPSLSFYNKARNYATKKPYSVEKFKLNFQMPTLASGWDVNKEKNNGAILFVKNGLYYLGIMPKQKGRYKALSFEPTEKTSEGFDKMYYDYFPDAAKMIPKCSTQLKAVTAHFQTHTTPILLSNNFIEPLEITKEIYDLNNPEKEPKKFQTAYAKKTGDQKGYREALCKWIDFTRDFLSKYTKTTSIDLSSLRPSSQYKDLGEYYAELNPLLYHISFQRIAEKEIMDAVETGKLYLFQIYNKDFAKGHHGKPNLHTLYWTGLFSPENLAKTSIKLNGQAELFYRPKSRMKRMAHRLGEKMLNKKLKDQKTPIPDTLYQELYDYVNHRLSHDLSDEARALLPNVITKEVSHEIIKDRRFTSDKFFFHVPITLNYQAANSPSKFNQRVNAYLKEHPETPIIGIDRGERNLIYITVIDSTGKILEQRSLNTIQQFDYQKKLDNREKERVAARQAWSVVGTIKDLKQGYLSQVIHEIVDLMIHYQAVVVLENLNFGFKSKRTGIAEKAVYQQFEKMLIDKLNCLVLKDYPAEKVGGVLNPYQLTDQFTSFAKMGTQSGFLFYVPAPYTSKIDPLTGFVDPFVWKTIKNHESRKHFLEGFDFLHYDVKTGDFILHFKMNRNLSFQRGLPGFMPAWDIVFEKNETQFDAKGTPFIAGKRIVPVIENHRFTGRYRDLYPANELIALLEEKGIVFRDGSNILPKLLENDDSHAIDTMVALIRSVLQMRNSNAATGEDYINSPVRDLNGVCFDSRFQNPEWPMDADANGAYHIALKGQLLLNHLKESKDLKLQNGISNQDWLAYIQELRN

SEQ ID NO: 82 - protein, 1307 aa, Artificial Sequence
  SYNTHETIC
MTQFEGFTNLYQVSKTLRFELIPQGKTLKHIQEQGFIEEDKARNDHYKELKPIIDRIYKTYADQCLQLVQLDWENLSAAIDSYRKEKTEETRNALIEEQATYRNAIHDYFIGRTDNLTDAINKRHAEIYKGLFKAELFNGKVLKQLGTVTTTEHENALLRSFDKFTTYFSGFYENRKNVFSAEDISTAIPHRIVQDNFPKFKENCHIFTRLITAVPSLREHFENVKKAIGIFVSTSIEEVFSFPFYNQLLTQTQIDLYNQLLGGISREAGTEKIKGLNEVLNLAIQKNDETAHIIASLPHRFIPLFKQILSDRNTLSFILEEFKSDEEVIQSFCKYKTLLRNENVLETAEALFNELNSIDLTHIFISHKKLETISSALCDHWDTLRNALYERRISELTGKITKSAKEKVQRSLKHEDINLQEIISAAGKELSEAFKQKTSEILSHAHAALDQPLPTTLKKQEEKEILKSQLDSLLGLYHLLDWFAVDESNEVDPEFSARLTGIKLNMEPSLSFYNKARNYATKKPYSVEKFKLNFQMPTLASGWDVNKEKNNGAILFVKNGLYYLGIMPKQKGRYKALSFEPTEKTSEGFDKMYYDYFPDAAKMIPKCSTQLKAVTAHFQTHTTPILLSNNFIEPLEITKEIYDLNNPEKEPKKFQTAYAKKTGDQKGYREALCKWIDFTRDFLSKYTKTTSIDLSSLRPSSQYKDLGEYYAELNPLLYHISFQRIAEKEIMDAVETGKLYLFQIYNKDFAKGHHGKPNLHTLYWTGLFSPENLAKTSIKLNGQAELFYRPKSRMKRMAHRLGEKMLNKKLKDQKTPIPDTLYQELYDYVNHRLSHDLSDEARALLPNVITKEVSHEIIKDRRFTSDKFFFHVPITLNYQAANSPSKFNQRVNAYLKEHPETPIIGIDRGERNLIYITVIDSTGKILEQRSLNTIQQFDYQKKLDNREKERVAARQAWSVVGTIKDLKQGYLSQVIHEIVDLMIHYQAVVVLENLNFGFKSKRTGIAEKAVYQQFEKMLIDKLNCLVLKDYPAEKVGGVLNPYQLTDQFTSFAKMGTQSGFLFYVPAPYTSKIDPLTGFVDPFVWKTIKNHESRKHFLEGFDFLHYDVKTGDFILHFKMNRNLSFQRGLPGFMPAWDIVFEKNETQFDAKGTPFIAGKRIVPVIENHRFTGRYRDLYPANELIALLEEKGIVFRDGSNILPKLLENDDSHAIDTMVALIRSVLQMRNSNAATGEDYINSPVRDLNGVCFDSRFQNPEWPMDADANGAYHIALKGQLLLNHLKESKDLKLQNGISNQDWLAYIQELRN

SEQ ID NO: 83 - protein, 1307 aa, Artificial Sequence
  SYNTHETIC
MTQFEGFTNLYQVSKTLRFELIPQGKTLKHIQEQGFIEEDKARNDHYKELKPIIDRIYKTYADQCLQLVQLDWENLSAAIDSYRKEKTEETRNALIEEQATYRNAIHDYFIGRTDNLTDAINKRHAEIYKGLFKAELFNGKVLKQLGTVTTTEHENALLRSFDKFTTYFSGFYENRKNVFSAEDISTAIPHRIVQDNFPKFKENCHIFTRLITAVPSLREHFENVKKAIGIFVSTSIEEVFSFPFYNQLLTQTQIDLYNQLLGGISREAGTEKIKGLNEVLNLAIQKNDETAHIIASLPHRFIPLFKQILSDRNTLSFILEEFKSDEEVIQSFCKYKTLLRNENVLETAEALFNELNSIDLTHIFISHKKLETISSALCDHWDTLRNALYERRISELTGKITKSAKEKVQRSLKHEDINLQEIISAAGKELSEAFKQKTSEILSHAHAALDQPLPTTLKKQEEKEILKSQLDSLLGLYHLLDWFAVDESNEVDPEFSARLTGIKLCMEPSLSFYNKARNYATKKPYSVEKFKLNFQMPTLASGWDVNKEKNNGAILFVKNGLYYLGIMPKQKGRYKALSFEPTEKTSEGFDKMYYDYFPDAAKMIPKCSTQLKAVTAHFQTHTTPILLSNNFIEPLEITKEIYDLNNPEKEPKKFQTAYAKKTGDQKGYREALCKWIDFTRDFLSKYTKTTSIDLSSLRPSSQYKDLGEYYAELNPLLYHISFQRIAEKEIMDAVETGKLYLFQIYNKDFAKGHHGKPNLHTLYWTGLFSPENLAKTSIKLNGQAELFYRPKSRMKRMAHRLGEKMLNKKLKDQKTPIPDTLYQELYDYVNHRLSHDLSDEARALLPNVITKEVSHEIIKDRRFTSDKFFFHVPITLNYQAANSPSKFNQRVNAYLKEHPETPIIGIDRGERNLIYITVIDSTGKILEQRSLNTIQQFDYQKKLDNREKERVAARQAWSVVGTIKDLKQGYLSQVIHEIVDLMIHYQAVVVLENLNFGFKSKRTGIAEKAVYQQFEKMLIDKLNCLVLKDYPAEKVGGVLNPYQLTDQFTSFAKMGTQSGFLFYVPAPYTSKIDPLTGFVDPFVWKTIKNHESRKHFLEGFDFLHYDVKTGDFILHFKMNRNLSFQRGLPGFMPAWDIVFEKNETQFDAKGTPFIAGKRIVPVIENHRFTGRYRDLYPANELIALLEEKGIVFRDGSNILPKLLENDDSHAIDTMVALIRSVLQMRNSNAATGEDYINSPVRDLNGVCFDSRFQNPEWPMDADANGAYHIALKGQLLLNHLKESKDLKLQNGISNQDWLAYIQELRN

SEQ ID NO: 84 - protein, 1307 aa, Artificial Sequence
  SYNTHETIC
MTQFEGFTNLYQVSKTLRFELIPQGKTLKHIQEQGFIEEDKARNDHYKELKPIIDRIYKTYADQCLQLVQLDWENLSAAIDSYRKEKTEETRNALIEEQATYRNAIHDYFIGRTDNLTDAINKRHAEIYKGLFKAELFNGKVLKQLGTVTTTEHENALLRSFDKFTTYFSGFYENRKNVFSAEDISTAIPHRIVQDNFPKFKENCHIFTRLITAVPSLREHFENVKKAIGIFVSTSIEEVFSFPFYNQLLTQTQIDLYNQLLGGISREAGTEKIKGLNEVLNLAIQKNDETAHIIASLPHRFIPLFKQILSDRNTLSFILEEFKSDEEVIQSFCKYKTLLRNENVLETAEALFNELNSIDLTHIFISHKKLETISSALCDHWDTLRNALYERRISELTGKITKSAKEKVQRSLKHEDINLQEIISAAGKELSEAFKQKTSEILSHAHAALDQPLPTTLKKQEEKEILKSQLDSLLGLYHLLDWFAVDESNEVDPEFSARLTGIKLQMEPSLSFYNKARNYATKKPYSVEKFKLNFQMPTLASGWDVNKEKNNGAILFVKNGLYYLGIMPKQKGRYKALSFEPTEKTSEGFDKMYYDYFPDAAKMIPKCSTQLKAVTAHFQTHTTPILLSNNFIEPLEITKEIYDLNNPEKEPKKFQTAYAKKTGDQKGYREALCKWIDFTRDFLSKYTKTTSIDLSSLRPSSQYKDLGEYYAELNPLLYHISFQRIAEKEIMDAVETGKLYLFQIYNKDFAKGHHGKPNLHTLYWTGLFSPENLAKTSIKLNGQAELFYRPKSRMKRMAHRLGEKMLNKKLKDQKTPIPDTLYQELYDYVNHRLSHDLSDEARALLPNVITKEVSHEIIKDRRFTSDKFFFHVPITLNYQAANSPSKFNQRVNAYLKEHPETPIIGIDRGERNLIYITVIDSTGKILEQRSLNTIQQFDYQKKLDNREKERVAARQAWSVVGTIKDLKQGYLSQVIHEIVDLMIHYQAVVVLENLNFGFKSKRTGIAEKAVYQQFEKMLIDKLNCLVLKDYPAEKVGGVLNPYQLTDQFTSFAKMGTQSGFLFYVPAPYTSKIDPLTGFVDPFVWKTIKNHESRKHFLEGFDFLHYDVKTGDFILHFKMNRNLSFQRGLPGFMPAWDIVFEKNETQFDAKGTPFIAGKRIVPVIENHRFTGRYRDLYPANELIALLEEKGIVFRDGSNILPKLLENDDSHAIDTMVALIRSVLQMRNSNAATGEDYINSPVRDLNGVCFDSRFQNPEWPMDADANGAYHIALKGQLLLNHLKESKDLKLQNGISNQDWLAYIQELRN

SEQ ID NO: 85 - protein, 1307 aa, Artificial Sequence
  SYNTHETIC
MTQFEGFTNLYQVSKTLRFELIPQGKTLKHIQEQGFIEEDKARNDHYKELKPIIDRIYKTYADQCLQLVQLDWENLSAAIDSYRKEKTEETRNALIEEQATYRNAIHDYFIGRTDNLTDAINKRHAEIYKGLFKAELFNGKVLKQLGTVTTTEHENALLRSFDKFTTYFSGFYENRKNVFSAEDISTAIPHRIVQDNFPKFKENCHIFTRLITAVPSLREHFENVKKAIGIFVSTSIEEVFSFPFYNQLLTQTQIDLYNQLLGGISREAGTEKIKGLNEVLNLAIQKNDETAHIIASLPHRFIPLFKQILSDRNTLSFILEEFKSDEEVIQSFCKYKTLLRNENVLETAEALFNELNSIDLTHIFISHKKLETISSALCDHWDTLRNALYERRISELTGKITKSAKEKVQRSLKHEDINLQEIISAAGKELSEAFKQKTSEILSHAHAALDQPLPTTLKKQEEKEILKSQLDSLLGLYHLLDWFAVDESNEVDPEFSARLTGIKLGMEPSLSFYNKARNYATKKPYSVEKFKLNFQMPTLASGWDVNKEKNNGAILFVKNGLYYLGIMPKQKGRYKALSFEPTEKTSEGFDKMYYDYFPDAAKMIPKCSTQLKAVTAHFQTHTTPILLSNNFIEPLEITKEIYDLNNPEKEPKKFQTAYAKKTGDQKGYREALCKWIDFTRDFLSKYTKTTSIDLSSLRPSSQYKDLGEYYAELNPLLYHISFQRIAEKEIMDAVETGKLYLFQIYNKDFAKGHHGKPNLHTLYWTGLFSPENLAKTSIKLNGQAELFYRPKSRMKRMAHRLGEKMLNKKLKDQKTPIPDTLYQELYDYVNHRLSHDLSDEARALLPNVITKEVSHEIIKDRRFTSDKFFFHVPITLNYQAANSPSKFNQRVNAYLKEHPETPIIGIDRGERNLIYITVIDSTGKILEQRSLNTIQQFDYQKKLDNREKERVAARQAWSVVGTIKDLKQGYLSQVIHEIVDLMIHYQAVVVLENLNFGFKSKRTGIAEKAVYQQFEKMLIDKLNCLVLKDYPAEKVGGVLNPYQLTDQFTSFAKMGTQSGFLFYVPAPYTSKIDPLTGFVDPFVWKTIKNHESRKHFLEGFDFLHYDVKTGDFILHFKMNRNLSFQRGLPGFMPAWDIVFEKNETQFDAKGTPFIAGKRIVPVIENHRFTGRYRDLYPANELIALLEEKGIVFRDGSNILPKLLENDDSHAIDTMVALIRSVLQMRNSNAATGEDYINSPVRDLNGVCFDSRFQNPEWPMDADANGAYHIALKGQLLLNHLKESKDLKLQNGISNQDWLAYIQELRN

SEQ ID NO: 86 - protein, 1307 aa, Artificial Sequence
  SYNTHETIC
MTQFEGFTNLYQVSKTLRFELIPQGKTLKHIQEQGFIEEDKARNDHYKELKPIIDRIYKTYADQCLQLVQLDWENLSAAIDSYRKEKTEETRNALIEEQATYRNAIHDYFIGRTDNLTDAINKRHAEIYKGLFKAELFNGKVLKQLGTVTTTEHENALLRSFDKFTTYFSGFYENRKNVFSAEDISTAIPHRIVQDNFPKFKENCHIFTRLITAVPSLREHFENVKKAIGIFVSTSIEEVFSFPFYNQLLTQTQIDLYNQLLGGISREAGTEKIKGLNEVLNLAIQKNDETAHIIASLPHRFIPLFKQILSDRNTLSFILEEFKSDEEVIQSFCKYKTLLRNENVLETAEALFNELNSIDLTHIFISHKKLETISSALCDHWDTLRNALYERRISELTGKITKSAKEKVQRSLKHEDINLQEIISAAGKELSEAFKQKTSEILSHAHAALDQPLPTTLKKQEEKEILKSQLDSLLGLYHLLDWFAVDESNEVDPEFSARLTGIKLHMEPSLSFYNKARNYATKKPYSVEKFKLNFQMPTLASGWDVNKEKNNGAILFVKNGLYYLGIMPKQKGRYKALSFEPTEKTSEGFDKMYYDYFPDAAKMIPKCSTQLKAVTAHFQTHTTPILLSNNFIEPLEITKEIYDLNNPEKEPKKFQTAYAKKTGDQKGYREALCKWIDFTRDFLSKYTKTTSIDLSSLRPSSQYKDLGEYYAELNPLLYHISFQRIAEKEIMDAVETGKLYLFQIYNKDFAKGHHGKPNLHTLYWTGLFSPENLAKTSIKLNGQAELFYRPKSRMKRMAHRLGEKMLNKKLKDQKTPIPDTLYQELYDYVNHRLSHDLSDEARALLPNVITKEVSHEIIKDRRFTSDKFFFHVPITLNYQAANSPSKFNQRVNAYLKEHPETPIIGIDRGERNLIYITVIDSTGKILEQRSLNTIQQFDYQKKLDNREKERVAARQAWSVVGTIKDLKQGYLSQVIHEIVDLMIHYQAVVVLENLNFGFKSKRTGIAEKAVYQQFEKMLIDKLNCLVLKDYPAEKVGGVLNPYQLTDQFTSFAKMGTQSGFLFYVPAPYTSKIDPLTGFVDPFVWKTIKNHESRKHFLEGFDFLHYDVKTGDFILHFKMNRNLSFQRGLPGFMPAWDIVFEKNETQFDAKGTPFIAGKRIVPVIENHRFTGRYRDLYPANELIALLEEKGIVFRDGSNILPKLLENDDSHAIDTMVALIRSVLQMRNSNAATGEDYINSPVRDLNGVCFDSRFQNPEWPMDADANGAYHIALKGQLLLNHLKESKDLKLQNGISNQDWLAYIQELRN

SEQ ID NO: 87 - protein, 1307 aa, Artificial Sequence
  SYNTHETIC
MTQFEGFTNLYQVSKTLRFELIPQGKTLKHIQEQGFIEEDKARNDHYKELKPIIDRIYKTYADQCLQLVQLDWENLSAAIDSYRKEKTEETRNALIEEQATYRNAIHDYFIGRTDNLTDAINKRHAEIYKGLFKAELFNGKVLKQLGTVTTTEHENALLRSFDKFTTYFSGFYENRKNVFSAEDISTAIPHRIVQDNFPKFKENCHIFTRLITAVPSLREHFENVKKAIGIFVSTSIEEVFSFPFYNQLLTQTQIDLYNQLLGGISREAGTEKIKGLNEVLNLAIQKNDETAHIIASLPHRFIPLFKQILSDRNTLSFILEEFKSDEEVIQSFCKYKTLLRNENVLETAEALFNELNSIDLTHIFISHKKLETISSALCDHWDTLRNALYERRISELTGKITKSAKEKVQRSLKHEDINLQEIISAAGKELSEAFKQKTSEILSHAHAALDQPLPTTLKKQEEKEILKSQLDSLLGLYHLLDWFAVDESNEVDPEFSARLTGIKLIMEPSLSFYNKARNYATKKPYSVEKFKLNFQMPTLASGWDVNKEKNNGAILFVKNGLYYLGIMPKQKGRYKALSFEPTEKTSEGFDKMYYDYFPDAAKMIPKCSTQLKAVTAHFQTHTTPILLSNNFIEPLEITKEIYDLNNPEKEPKKFQTAYAKKTGDQKGYREALCKWIDFTRDFLSKYTKTTSIDLSSLRPSSQYKDLGEYYAELNPLLYHISFQRIAEKEIMDAVETGKLYLFQIYNKDFAKGHHGKPNLHTLYWTGLFSPENLAKTSIKLNGQAELFYRPKSRMKRMAHRLGEKMLNKKLKDQKTPIPDTLYQELYDYVNHRLSHDLSDEARALLPNVITKEVSHEIIKDRRFTSDKFFFHVPITLNYQAANSPSKFNQRVNAYLKEHPETPIIGIDRGERNLIYITVIDSTGKILEQRSLNTIQQFDYQKKLDNREKERVAARQAWSVVGTIKDLKQGYLSQVIHEIVDLMIHYQAVVVLENLNFGFKSKRTGIAEKAVYQQFEKMLIDKLNCLVLKDYPAEKVGGVLNPYQLTDQFTSFAKMGTQSGFLFYVPAPYTSKIDPLTGFVDPFVWKTIKNHESRKHFLEGFDFLHYDVKTGDFILHFKMNRNLSFQRGLPGFMPAWDIVFEKNETQFDAKGTPFIAGKRIVPVIENHRFTGRYRDLYPANELIALLEEKGIVFRDGSNILPKLLENDDSHAIDTMVALIRSVLQMRNSNAATGEDYINSPVRDLNGVCFDSRFQNPEWPMDADANGAYHIALKGQLLLNHLKESKDLKLQNGISNQDWLAYIQELRN

SEQ ID NO: 88 - protein, 1307 aa, Artificial Sequence
  SYNTHETIC
MTQFEGFTNLYQVSKTLRFELIPQGKTLKHIQEQGFIEEDKARNDHYKELKPIIDRIYKTYADQCLQLVQLDWENLSAAIDSYRKEKTEETRNALIEEQATYRNAIHDYFIGRTDNLTDAINKRHAEIYKGLFKAELFNGKVLKQLGTVTTTEHENALLRSFDKFTTYFSGFYENRKNVFSAEDISTAIPHRIVQDNFPKFKENCHIFTRLITAVPSLREHFENVKKAIGIFVSTSIEEVFSFPFYNQLLTQTQIDLYNQLLGGISREAGTEKIKGLNEVLNLAIQKNDETAHIIASLPHRFIPLFKQILSDRNTLSFILEEFKSDEEVIQSFCKYKTLLRNENVLETAEALFNELNSIDLTHIFISHKKLETISSALCDHWDTLRNALYERRISELTGKITKSAKEKVQRSLKHEDINLQEIISAAGKELSEAFKQKTSEILSHAHAALDQPLPTTLKKQEEKEILKSQLDSLLGLYHLLDWFAVDESNEVDPEFSARLTGIKLLMEPSLSFYNKARNYATKKPYSVEKFKLNFQMPTLASGWDVNKEKNNGAILFVKNGLYYLGIMPKQKGRYKALSFEPTEKTSEGFDKMYYDYFPDAAKMIPKCSTQLKAVTAHFQTHTTPILLSNNFIEPLEITKEIYDLNNPEKEPKKFQTAYAKKTGDQKGYREALCKWIDFTRDFLSKYTKTTSIDLSSLRPSSQYKDLGEYYAELNPLLYHISFQRIAEKEIMDAVETGKLYLFQIYNKDFAKGHHGKPNLHTLYWTGLFSPENLAKTSIKLNGQAELFYRPKSRMKRMAHRLGEKMLNKKLKDQKTPIPDTLYQELYDYVNHRLSHDLSDEARALLPNVITKEVSHEIIKDRRFTSDKFFFHVPITLNYQAANSPSKFNQRVNAYLKEHPETPIIGIDRGERNLIYITVIDSTGKILEQRSLNTIQQFDYQKKLDNREKERVAARQAWSVVGTIKDLKQGYLSQVIHEIVDLMIHYQAVVVLENLNFGFKSKRTGIAEKAVYQQFEKMLIDKLNCLVLKDYPAEKVGGVLNPYQLTDQFTSFAKMGTQSGFLFYVPAPYTSKIDPLTGFVDPFVWKTIKNHESRKHFLEGFDFLHYDVKTGDFILHFKMNRNLSFQRGLPGFMPAWDIVFEKNETQFDAKGTPFIAGKRIVPVIENHRFTGRYRDLYPANELIALLEEKGIVFRDGSNILPKLLENDDSHAIDTMVALIRSVLQMRNSNAATGEDYINSPVRDLNGVCFDSRFQNPEWPMDADANGAYHIALKGQLLLNHLKESKDLKLQNGISNQDWLAYIQELRN

SEQ ID NO: 89 - protein, 1307 aa, Artificial Sequence
  SYNTHETIC
MTQFEGFTNLYQVSKTLRFELIPQGKTLKHIQEQGFIEEDKARNDHYKELKPIIDRIYKTYADQCLQLVQLDWENLSAAIDSYRKEKTEETRNALIEEQATYRNAIHDYFIGRTDNLTDAINKRHAEIYKGLFKAELFNGKVLKQLGTVTTTEHENALLRSFDKFTTYFSGFYENRKNVFSAEDISTAIPHRIVQDNFPKFKENCHIFTRLITAVPSLREHFENVKKAIGIFVSTSIEEVFSFPFYNQLLTQTQIDLYNQLLGGISREAGTEKIKGLNEVLNLAIQKNDETAHIIASLPHRFIPLFKQILSDRNTLSFILEEFKSDEEVIQSFCKYKTLLRNENVLETAEALFNELNSIDLTHIFISHKKLETISSALCDHWDTLRNALYERRISELTGKITKSAKEKVQRSLKHEDINLQEIISAAGKELSEAFKQKTSEILSHAHAALDQPLPTTLKKQEEKEILKSQLDSLLGLYHLLDWFAVDESNEVDPEFSARLTGIKLKMEPSLSFYNKARNYATKKPYSVEKFKLNFQMPTLASGWDVNKEKNNGAILFVKNGLYYLGIMPKQKGRYKALSFEPTEKTSEGFDKMYYDYFPDAAKMIPKCSTQLKAVTAHFQTHTTPILLSNNFIEPLEITKEIYDLNNPEKEPKKFQTAYAKKTGDQKGYREALCKWIDFTRDFLSKYTKTTSIDLSSLRPSSQYKDLGEYYAELNPLLYHISFQRIAEKEIMDAVETGKLYLFQIYNKDFAKGHHGKPNLHTLYWTGLFSPENLAKTSIKLNGQAELFYRPKSRMKRMAHRLGEKMLNKKLKDQKTPIPDTLYQELYDYVNHRLSHDLSDEARALLPNVITKEVSHEIIKDRRFTSDKFFFHVPITLNYQAANSPSKFNQRVNAYLKEHPETPIIGIDRGERNLIYITVIDSTGKILEQRSLNTIQQFDYQKKLDNREKERVAARQAWSVVGTIKDLKQGYLSQVIHEIVDLMIHYQAVVVLENLNFGFKSKRTGIAEKAVYQQFEKMLIDKLNCLVLKDYPAEKVGGVLNPYQLTDQFTSFAKMGTQSGFLFYVPAPYTSKIDPLTGFVDPFVWKTIKNHESRKHFLEGFDFLHYDVKTGDFILHFKMNRNLSFQRGLPGFMPAWDIVFEKNETQFDAKGTPFIAGKRIVPVIENHRFTGRYRDLYPANELIALLEEKGIVFRDGSNILPKLLENDDSHAIDTMVALIRSVLQMRNSNAATGEDYINSPVRDLNGVCFDSRFQNPEWPMDADANGAYHIALKGQLLLNHLKESKDLKLQNGISNQDWLAYIQELRN

SEQ ID NO: 90 - protein, 1307 aa, Artificial Sequence
  SYHTHETIC
MTQFEGFTNLYQVSKTLRFELIPQGKTLKHIQEQGFIEEDKARNDHYKELKPIIDRIYKTYADQCLQLVQLDWENLSAAIDSYRKEKTEETRNALIEEQATYRNAIHDYFIGRTDNLTDAINKRHAEIYKGLFKAELFNGKVLKQLGTVTTTEHENALLRSFDKFTTYFSGFYENRKNVFSAEDISTAIPHRIVQDNFPKFKENCHIFTRLITAVPSLREHFENVKKAIGIFVSTSIEEVFSFPFYNQLLTQTQIDLYNQLLGGISREAGTEKIKGLNEVLNLAIQKNDETAHIIASLPHRFIPLFKQILSDRNTLSFILEEFKSDEEVIQSFCKYKTLLRNENVLETAEALFNELNSIDLTHIFISHKKLETISSALCDHWDTLRNALYERRISELTGKITKSAKEKVQRSLKHEDINLQEIISAAGKELSEAFKQKTSEILSHAHAALDQPLPTTLKKQEEKEILKSQLDSLLGLYHLLDWFAVDESNEVDPEFSARLTGIKLMMEPSLSFYNKARNYATKKPYSVEKFKLNFQMPTLASGWDVNKEKNNGAILFVKNGLYYLGIMPKQKGRYKALSFEPTEKTSEGFDKMYYDYFPDAAKMIPKCSTQLKAVTAHFQTHTTPILLSNNFIEPLEITKEIYDLNNPEKEPKKFQTAYAKKTGDQKGYREALCKWIDFTRDFLSKYTKTTSIDLSSLRPSSQYKDLGEYYAELNPLLYHISFQRIAEKEIMDAVETGKLYLFQIYNKDFAKGHHGKPNLHTLYWTGLFSPENLAKTSIKLNGQAELFYRPKSRMKRMAHRLGEKMLNKKLKDQKTPIPDTLYQELYDYVNHRLSHDLSDEARALLPNVITKEVSHEIIKDRRFTSDKFFFHVPITLNYQAANSPSKFNQRVNAYLKEHPETPIIGIDRGERNLIYITVIDSTGKILEQRSLNTIQQFDYQKKLDNREKERVAARQAWSVVGTIKDLKQGYLSQVIHEIVDLMIHYQAVVVLENLNFGFKSKRTGIAEKAVYQQFEKMLIDKLNCLVLKDYPAEKVGGVLNPYQLTDQFTSFAKMGTQSGFLFYVPAPYTSKIDPLTGFVDPFVWKTIKNHESRKHFLEGFDFLHYDVKTGDFILHFKMNRNLSFQRGLPGFMPAWDIVFEKNETQFDAKGTPFIAGKRIVPVIENHRFTGRYRDLYPANELIALLEEKGIVFRDGSNILPKLLENDDSHAIDTMVALIRSVLQMRNSNAATGEDYINSPVRDLNGVCFDSRFQNPEWPMDADANGAYHIALKGQLLLNHLKESKDLKLQNGISNQDWLAYIQELRN

SEQ ID NO: 91 - protein, 1307 aa, Artificial Sequence
  synthetic
MTQFEGFTNLYQVSKTLRFELIPQGKTLKHIQEQGFIEEDKARNDHYKELKPIIDRIYKTYADQCLQLVQLDWENLSAAIDSYRKEKTEETRNALIEEQATYRNAIHDYFIGRTDNLTDAINKRHAEIYKGLFKAELFNGKVLKQLGTVTTTEHENALLRSFDKFTTYFSGFYENRKNVFSAEDISTAIPHRIVQDNFPKFKENCHIFTRLITAVPSLREHFENVKKAIGIFVSTSIEEVFSFPFYNQLLTQTQIDLYNQLLGGISREAGTEKIKGLNEVLNLAIQKNDETAHIIASLPHRFIPLFKQILSDRNTLSFILEEFKSDEEVIQSFCKYKTLLRNENVLETAEALFNELNSIDLTHIFISHKKLETISSALCDHWDTLRNALYERRISELTGKITKSAKEKVQRSLKHEDINLQEIISAAGKELSEAFKQKTSEILSHAHAALDQPLPTTLKKQEEKEILKSQLDSLLGLYHLLDWFAVDESNEVDPEFSARLTGIKLSMEPSLSFYNKARNYATKKPYSVEKFKLNFQMPTLASGWDVNKEKNNGAILFVKNGLYYLGIMPKQKGRYKALSFEPTEKTSEGFDKMYYDYFPDAAKMIPKCSTQLKAVTAHFQTHTTPILLSNNFIEPLEITKEIYDLNNPEKEPKKFQTAYAKKTGDQKGYREALCKWIDFTRDFLSKYTKTTSIDLSSLRPSSQYKDLGEYYAELNPLLYHISFQRIAEKEIMDAVETGKLYLFQIYNKDFAKGHHGKPNLHTLYWTGLFSPENLAKTSIKLNGQAELFYRPKSRMKRMAHRLGEKMLNKKLKDQKTPIPDTLYQELYDYVNHRLSHDLSDEARALLPNVITKEVSHEIIKDRRFTSDKFFFHVPITLNYQAANSPSKFNQRVNAYLKEHPETPIIGIDRGERNLIYITVIDSTGKILEQRSLNTIQQFDYQKKLDNREKERVAARQAWSVVGTIKDLKQGYLSQVIHEIVDLMIHYQAVVVLENLNFGFKSKRTGIAEKAVYQQFEKMLIDKLNCLVLKDYPAEKVGGVLNPYQLTDQFTSFAKMGTQSGFLFYVPAPYTSKIDPLTGFVDPFVWKTIKNHESRKHFLEGFDFLHYDVKTGDFILHFKMNRNLSFQRGLPGFMPAWDIVFEKNETQFDAKGTPFIAGKRIVPVIENHRFTGRYRDLYPANELIALLEEKGIVFRDGSNILPKLLENDDSHAIDTMVALIRSVLQMRNSNAATGEDYINSPVRDLNGVCFDSRFQNPEWPMDADANGAYHIALKGQLLLNHLKESKDLKLQNGISNQDWLAYIQELRN

SEQ ID NO: 92 - protein, 1307 aa, Artificial Sequence
  SYNTHETIC
MTQFEGFTNLYQVSKTLRFELIPQGKTLKHIQEQGFIEEDKARNDHYKELKPIIDRIYKTYADQCLQLVQLDWENLSAAIDSYRKEKTEETRNALIEEQATYRNAIHDYFIGRTDNLTDAINKRHAEIYKGLFKAELFNGKVLKQLGTVTTTEHENALLRSFDKFTTYFSGFYENRKNVFSAEDISTAIPHRIVQDNFPKFKENCHIFTRLITAVPSLREHFENVKKAIGIFVSTSIEEVFSFPFYNQLLTQTQIDLYNQLLGGISREAGTEKIKGLNEVLNLAIQKNDETAHIIASLPHRFIPLFKQILSDRNTLSFILEEFKSDEEVIQSFCKYKTLLRNENVLETAEALFNELNSIDLTHIFISHKKLETISSALCDHWDTLRNALYERRISELTGKITKSAKEKVQRSLKHEDINLQEIISAAGKELSEAFKQKTSEILSHAHAALDQPLPTTLKKQEEKEILKSQLDSLLGLYHLLDWFAVDESNEVDPEFSARLTGIKLTMEPSLSFYNKARNYATKKPYSVEKFKLNFQMPTLASGWDVNKEKNNGAILFVKNGLYYLGIMPKQKGRYKALSFEPTEKTSEGFDKMYYDYFPDAAKMIPKCSTQLKAVTAHFQTHTTPILLSNNFIEPLEITKEIYDLNNPEKEPKKFQTAYAKKTGDQKGYREALCKWIDFTRDFLSKYTKTTSIDLSSLRPSSQYKDLGEYYAELNPLLYHISFQRIAEKEIMDAVETGKLYLFQIYNKDFAKGHHGKPNLHTLYWTGLFSPENLAKTSIKLNGQAELFYRPKSRMKRMAHRLGEKMLNKKLKDQKTPIPDTLYQELYDYVNHRLSHDLSDEARALLPNVITKEVSHEIIKDRRFTSDKFFFHVPITLNYQAANSPSKFNQRVNAYLKEHPETPIIGIDRGERNLIYITVIDSTGKILEQRSLNTIQQFDYQKKLDNREKERVAARQAWSVVGTIKDLKQGYLSQVIHEIVDLMIHYQAVVVLENLNFGFKSKRTGIAEKAVYQQFEKMLIDKLNCLVLKDYPAEKVGGVLNPYQLTDQFTSFAKMGTQSGFLFYVPAPYTSKIDPLTGFVDPFVWKTIKNHESRKHFLEGFDFLHYDVKTGDFILHFKMNRNLSFQRGLPGFMPAWDIVFEKNETQFDAKGTPFIAGKRIVPVIENHRFTGRYRDLYPANELIALLEEKGIVFRDGSNILPKLLENDDSHAIDTMVALIRSVLQMRNSNAATGEDYINSPVRDLNGVCFDSRFQNPEWPMDADANGAYHIALKGQLLLNHLKESKDLKLQNGISNQDWLAYIQELRN

SEQ ID NO: 93 - protein, 1307 aa, Artificial Sequence
  SYNTHETIC
MTQFEGFTNLYQVSKTLRFELIPQGKTLKHIQEQGFIEEDKARNDHYKELKPIIDRIYKTYADQCLQLVQLDWENLSAAIDSYRKEKTEETRNALIEEQATYRNAIHDYFIGRTDNLTDAINKRHAEIYKGLFKAELFNGKVLKQLGTVTTTEHENALLRSFDKFTTYFSGFYENRKNVFSAEDISTAIPHRIVQDNFPKFKENCHIFTRLITAVPSLREHFENVKKAIGIFVSTSIEEVFSFPFYNQLLTQTQIDLYNQLLGGISREAGTEKIKGLNEVLNLAIQKNDETAHIIASLPHRFIPLFKQILSDRNTLSFILEEFKSDEEVIQSFCKYKTLLRNENVLETAEALFNELNSIDLTHIFISHKKLETISSALCDHWDTLRNALYERRISELTGKITKSAKEKVQRSLKHEDINLQEIISAAGKELSEAFKQKTSEILSHAHAALDQPLPTTLKKQEEKEILKSQLDSLLGLYHLLDWFAVDESNEVDPEFSARLTGIKLYMEPSLSFYNKARNYATKKPYSVEKFKLNFQMPTLASGWDVNKEKNNGAILFVKNGLYYLGIMPKQKGRYKALSFEPTEKTSEGFDKMYYDYFPDAAKMIPKCSTQLKAVTAHFQTHTTPILLSNNFIEPLEITKEIYDLNNPEKEPKKFQTAYAKKTGDQKGYREALCKWIDFTRDFLSKYTKTTSIDLSSLRPSSQYKDLGEYYAELNPLLYHISFQRIAEKEIMDAVETGKLYLFQIYNKDFAKGHHGKPNLHTLYWTGLFSPENLAKTSIKLNGQAELFYRPKSRMKRMAHRLGEKMLNKKLKDQKTPIPDTLYQELYDYVNHRLSHDLSDEARALLPNVITKEVSHEIIKDRRFTSDKFFFHVPITLNYQAANSPSKFNQRVNAYLKEHPETPIIGIDRGERNLIYITVIDSTGKILEQRSLNTIQQFDYQKKLDNREKERVAARQAWSVVGTIKDLKQGYLSQVIHEIVDLMIHYQAVVVLENLNFGFKSKRTGIAEKAVYQQFEKMLIDKLNCLVLKDYPAEKVGGVLNPYQLTDQFTSFAKMGTQSGFLFYVPAPYTSKIDPLTGFVDPFVWKTIKNHESRKHFLEGFDFLHYDVKTGDFILHFKMNRNLSFQRGLPGFMPAWDIVFEKNETQFDAKGTPFIAGKRIVPVIENHRFTGRYRDLYPANELIALLEEKGIVFRDGSNILPKLLENDDSHAIDTMVALIRSVLQMRNSNAATGEDYINSPVRDLNGVCFDSRFQNPEWPMDADANGAYHIALKGQLLLNHLKESKDLKLQNGISNQDWLAYIQELRN

SEQ ID NO: 94 - protein, 1307 aa, Artificial Sequence
  SYNTHETIC
MTQFEGFTNLYQVSKTLRFELIPQGKTLKHIQEQGFIEEDKARNDHYKELKPIIDRIYKTYADQCLQLVQLDWENLSAAIDSYRKEKTEETRNALIEEQATYRNAIHDYFIGRTDNLTDAINKRHAEIYKGLFKAELFNGKVLKQLGTVTTTEHENALLRSFDKFTTYFSGFYENRKNVFSAEDISTAIPHRIVQDNFPKFKENCHIFTRLITAVPSLREHFENVKKAIGIFVSTSIEEVFSFPFYNQLLTQTQIDLYNQLLGGISREAGTEKIKGLNEVLNLAIQKNDETAHIIASLPHRFIPLFKQILSDRNTLSFILEEFKSDEEVIQSFCKYKTLLRNENVLETAEALFNELNSIDLTHIFISHKKLETISSALCDHWDTLRNALYERRISELTGKITKSAKEKVQRSLKHEDINLQEIISAAGKELSEAFKQKTSEILSHAHAALDQPLPTTLKKQEEKEILKSQLDSLLGLYHLLDWFAVDESNEVDPEFSARLTGIKLVMEPSLSFYNKARNYATKKPYSVEKFKLNFQMPTLASGWDVNKEKNNGAILFVKNGLYYLGIMPKQKGRYKALSFEPTEKTSEGFDKMYYDYFPDAAKMIPKCSTQLKAVTAHFQTHTTPILLSNNFIEPLEITKEIYDLNNPEKEPKKFQTAYAKKTGDQKGYREALCKWIDFTRDFLSKYTKTTSIDLSSLRPSSQYKDLGEYYAELNPLLYHISFQRIAEKEIMDAVETGKLYLFQIYNKDFAKGHHGKPNLHTLYWTGLFSPENLAKTSIKLNGQAELFYRPKSRMKRMAHRLGEKMLNKKLKDQKTPIPDTLYQELYDYVNHRLSHDLSDEARALLPNVITKEVSHEIIKDRRFTSDKFFFHVPITLNYQAANSPSKFNQRVNAYLKEHPETPIIGIDRGERNLIYITVIDSTGKILEQRSLNTIQQFDYQKKLDNREKERVAARQAWSVVGTIKDLKQGYLSQVIHEIVDLMIHYQAVVVLENLNFGFKSKRTGIAEKAVYQQFEKMLIDKLNCLVLKDYPAEKVGGVLNPYQLTDQFTSFAKMGTQSGFLFYVPAPYTSKIDPLTGFVDPFVWKTIKNHESRKHFLEGFDFLHYDVKTGDFILHFKMNRNLSFQRGLPGFMPAWDIVFEKNETQFDAKGTPFIAGKRIVPVIENHRFTGRYRDLYPANELIALLEEKGIVFRDGSNILPKLLENDDSHAIDTMVALIRSVLQMRNSNAATGEDYINSPVRDLNGVCFDSRFQNPEWPMDADANGAYHIALKGQLLLNHLKESKDLKLQNGISNQDWLAYIQELRN

SEQ ID NO: 95 - protein, 1307 aa, Artificial Sequence
  SYNTHETIC
MTQFEGFTNLYQVSKTLRFELIPQGKTLKHIQEQGFIEEDKARNDHYKELKPIIDRIYKTYADQCLQLVQLDWENLSAAIDSYRKEKTEETRNALIEEQATYRNAIHDYFIGRTDNLTDAINKRHAEIYKGLFKAELFNGKVLKQLGTVTTTEHENALLRSFDKFTTYFSGFYENRKNVFSAEDISTAIPHRIVQDNFPKFKENCHIFTRLITAVPSLREHFENVKKAIGIFVSTSIEEVFSFPFYNQLLTQTQIDLYNQLLGGISREAGTEKIKGLNEVLNLAIQKNDETAHIIASLPHRFIPLFKQILSDRNTLSFILEEFKSDEEVIQSFCKYKTLLRNENVLETAEALFNELNSIDLTHIFISHKKLETISSALCDHWDTLRNALYERRISELTGKITKSAKEKVQRSLKHEDINLQEIISAAGKELSEAFKQKTSEILSHAHAALDQPLPTTLKKQEEKEILKSQLDSLLGLYHLLDWFAVDESNEVDPEFSARLTGIKLEMAPSLSFYNKARNYATKKPYSVEKFKLNFQMPTLASGWDVNKEKNNGAILFVKNGLYYLGIMPKQKGRYKALSFEPTEKTSEGFDKMYYDYFPDAAKMIPKCSTQLKAVTAHFQTHTTPILLSNNFIEPLEITKEIYDLNNPEKEPKKFQTAYAKKTGDQKGYREALCKWIDFTRDFLSKYTKTTSIDLSSLRPSSQYKDLGEYYAELNPLLYHISFQRIAEKEIMDAVETGKLYLFQIYNKDFAKGHHGKPNLHTLYWTGLFSPENLAKTSIKLNGQAELFYRPKSRMKRMAHRLGEKMLNKKLKDQKTPIPDTLYQELYDYVNHRLSHDLSDEARALLPNVITKEVSHEIIKDRRFTSDKFFFHVPITLNYQAANSPSKFNQRVNAYLKEHPETPIIGIDRGERNLIYITVIDSTGKILEQRSLNTIQQFDYQKKLDNREKERVAARQAWSVVGTIKDLKQGYLSQVIHEIVDLMIHYQAVVVLENLNFGFKSKRTGIAEKAVYQQFEKMLIDKLNCLVLKDYPAEKVGGVLNPYQLTDQFTSFAKMGTQSGFLFYVPAPYTSKIDPLTGFVDPFVWKTIKNHESRKHFLEGFDFLHYDVKTGDFILHFKMNRNLSFQRGLPGFMPAWDIVFEKNETQFDAKGTPFIAGKRIVPVIENHRFTGRYRDLYPANELIALLEEKGIVFRDGSNILPKLLENDDSHAIDTMVALIRSVLQMRNSNAATGEDYINSPVRDLNGVCFDSRFQNPEWPMDADANGAYHIALKGQLLLNHLKESKDLKLQNGISNQDWLAYIQELRN

SEQ ID NO: 96 - protein, 1307 aa, Artificial Sequence
  SYNTHETIC
MTQFEGFTNLYQVSKTLRFELIPQGKTLKHIQEQGFIEEDKARNDHYKELKPIIDRIYKTYADQCLQLVQLDWENLSAAIDSYRKEKTEETRNALIEEQATYRNAIHDYFIGRTDNLTDAINKRHAEIYKGLFKAELFNGKVLKQLGTVTTTEHENALLRSFDKFTTYFSGFYENRKNVFSAEDISTAIPHRIVQDNFPKFKENCHIFTRLITAVPSLREHFENVKKAIGIFVSTSIEEVFSFPFYNQLLTQTQIDLYNQLLGGISREAGTEKIKGLNEVLNLAIQKNDETAHIIASLPHRFIPLFKQILSDRNTLSFILEEFKSDEEVIQSFCKYKTLLRNENVLETAEALFNELNSIDLTHIFISHKKLETISSALCDHWDTLRNALYERRISELTGKITKSAKEKVQRSLKHEDINLQEIISAAGKELSEAFKQKTSEILSHAHAALDQPLPTTLKKQEEKEILKSQLDSLLGLYHLLDWFAVDESNEVDPEFSARLTGIKLEMRPSLSFYNKARNYATKKPYSVEKFKLNFQMPTLASGWDVNKEKNNGAILFVKNGLYYLGIMPKQKGRYKALSFEPTEKTSEGFDKMYYDYFPDAAKMIPKCSTQLKAVTAHFQTHTTPILLSNNFIEPLEITKEIYDLNNPEKEPKKFQTAYAKKTGDQKGYREALCKWIDFTRDFLSKYTKTTSIDLSSLRPSSQYKDLGEYYAELNPLLYHISFQRIAEKEIMDAVETGKLYLFQIYNKDFAKGHHGKPNLHTLYWTGLFSPENLAKTSIKLNGQAELFYRPKSRMKRMAHRLGEKMLNKKLKDQKTPIPDTLYQELYDYVNHRLSHDLSDEARALLPNVITKEVSHEIIKDRRFTSDKFFFHVPITLNYQAANSPSKFNQRVNAYLKEHPETPIIGIDRGERNLIYITVIDSTGKILEQRSLNTIQQFDYQKKLDNREKERVAARQAWSVVGTIKDLKQGYLSQVIHEIVDLMIHYQAVVVLENLNFGFKSKRTGIAEKAVYQQFEKMLIDKLNCLVLKDYPAEKVGGVLNPYQLTDQFTSFAKMGTQSGFLFYVPAPYTSKIDPLTGFVDPFVWKTIKNHESRKHFLEGFDFLHYDVKTGDFILHFKMNRNLSFQRGLPGFMPAWDIVFEKNETQFDAKGTPFIAGKRIVPVIENHRFTGRYRDLYPANELIALLEEKGIVFRDGSNILPKLLENDDSHAIDTMVALIRSVLQMRNSNAATGEDYINSPVRDLNGVCFDSRFQNPEWPMDADANGAYHIALKGQLLLNHLKESKDLKLQNGISNQDWLAYIQELRN

SEQ ID NO: 97 - protein, 1307 aa, Artificial Sequence
  SYNTHETIC
MTQFEGFTNLYQVSKTLRFELIPQGKTLKHIQEQGFIEEDKARNDHYKELKPIIDRIYKTYADQCLQLVQLDWENLSAAIDSYRKEKTEETRNALIEEQATYRNAIHDYFIGRTDNLTDAINKRHAEIYKGLFKAELFNGKVLKQLGTVTTTEHENALLRSFDKFTTYFSGFYENRKNVFSAEDISTAIPHRIVQDNFPKFKENCHIFTRLITAVPSLREHFENVKKAIGIFVSTSIEEVFSFPFYNQLLTQTQIDLYNQLLGGISREAGTEKIKGLNEVLNLAIQKNDETAHIIASLPHRFIPLFKQILSDRNTLSFILEEFKSDEEVIQSFCKYKTLLRNENVLETAEALFNELNSIDLTHIFISHKKLETISSALCDHWDTLRNALYERRISELTGKITKSAKEKVQRSLKHEDINLQEIISAAGKELSEAFKQKTSEILSHAHAALDQPLPTTLKKQEEKEILKSQLDSLLGLYHLLDWFAVDESNEVDPEFSARLTGIKLEMQPSLSFYNKARNYATKKPYSVEKFKLNFQMPTLASGWDVNKEKNNGAILFVKNGLYYLGIMPKQKGRYKALSFEPTEKTSEGFDKMYYDYFPDAAKMIPKCSTQLKAVTAHFQTHTTPILLSNNFIEPLEITKEIYDLNNPEKEPKKFQTAYAKKTGDQKGYREALCKWIDFTRDFLSKYTKTTSIDLSSLRPSSQYKDLGEYYAELNPLLYHISFQRIAEKEIMDAVETGKLYLFQIYNKDFAKGHHGKPNLHTLYWTGLFSPENLAKTSIKLNGQAELFYRPKSRMKRMAHRLGEKMLNKKLKDQKTPIPDTLYQELYDYVNHRLSHDLSDEARALLPNVITKEVSHEIIKDRRFTSDKFFFHVPITLNYQAANSPSKFNQRVNAYLKEHPETPIIGIDRGERNLIYITVIDSTGKILEQRSLNTIQQFDYQKKLDNREKERVAARQAWSVVGTIKDLKQGYLSQVIHEIVDLMIHYQAVVVLENLNFGFKSKRTGIAEKAVYQQFEKMLIDKLNCLVLKDYPAEKVGGVLNPYQLTDQFTSFAKMGTQSGFLFYVPAPYTSKIDPLTGFVDPFVWKTIKNHESRKHFLEGFDFLHYDVKTGDFILHFKMNRNLSFQRGLPGFMPAWDIVFEKNETQFDAKGTPFIAGKRIVPVIENHRFTGRYRDLYPANELIALLEEKGIVFRDGSNILPKLLENDDSHAIDTMVALIRSVLQMRNSNAATGEDYINSPVRDLNGVCFDSRFQNPEWPMDADANGAYHIALKGQLLLNHLKESKDLKLQNGISNQDWLAYIQELRN

SEQ ID NO: 98 - protein, 1307 aa, Artificial Sequence
  SYNTHETIC
MTQFEGFTNLYQVSKTLRFELIPQGKTLKHIQEQGFIEEDKARNDHYKELKPIIDRIYKTYADQCLQLVQLDWENLSAAIDSYRKEKTEETRNALIEEQATYRNAIHDYFIGRTDNLTDAINKRHAEIYKGLFKAELFNGKVLKQLGTVTTTEHENALLRSFDKFTTYFSGFYENRKNVFSAEDISTAIPHRIVQDNFPKFKENCHIFTRLITAVPSLREHFENVKKAIGIFVSTSIEEVFSFPFYNQLLTQTQIDLYNQLLGGISREAGTEKIKGLNEVLNLAIQKNDETAHIIASLPHRFIPLFKQILSDRNTLSFILEEFKSDEEVIQSFCKYKTLLRNENVLETAEALFNELNSIDLTHIFISHKKLETISSALCDHWDTLRNALYERRISELTGKITKSAKEKVQRSLKHEDINLQEIISAAGKELSEAFKQKTSEILSHAHAALDQPLPTTLKKQEEKEILKSQLDSLLGLYHLLDWFAVDESNEVDPEFSARLTGIKLEMGPSLSFYNKARNYATKKPYSVEKFKLNFQMPTLASGWDVNKEKNNGAILFVKNGLYYLGIMPKQKGRYKALSFEPTEKTSEGFDKMYYDYFPDAAKMIPKCSTQLKAVTAHFQTHTTPILLSNNFIEPLEITKEIYDLNNPEKEPKKFQTAYAKKTGDQKGYREALCKWIDFTRDFLSKYTKTTSIDLSSLRPSSQYKDLGEYYAELNPLLYHISFQRIAEKEIMDAVETGKLYLFQIYNKDFAKGHHGKPNLHTLYWTGLFSPENLAKTSIKLNGQAELFYRPKSRMKRMAHRLGEKMLNKKLKDQKTPIPDTLYQELYDYVNHRLSHDLSDEARALLPNVITKEVSHEIIKDRRFTSDKFFFHVPITLNYQAANSPSKFNQRVNAYLKEHPETPIIGIDRGERNLIYITVIDSTGKILEQRSLNTIQQFDYQKKLDNREKERVAARQAWSVVGTIKDLKQGYLSQVIHEIVDLMIHYQAVVVLENLNFGFKSKRTGIAEKAVYQQFEKMLIDKLNCLVLKDYPAEKVGGVLNPYQLTDQFTSFAKMGTQSGFLFYVPAPYTSKIDPLTGFVDPFVWKTIKNHESRKHFLEGFDFLHYDVKTGDFILHFKMNRNLSFQRGLPGFMPAWDIVFEKNETQFDAKGTPFIAGKRIVPVIENHRFTGRYRDLYPANELIALLEEKGIVFRDGSNILPKLLENDDSHAIDTMVALIRSVLQMRNSNAATGEDYINSPVRDLNGVCFDSRFQNPEWPMDADANGAYHIALKGQLLLNHLKESKDLKLQNGISNQDWLAYIQELRN

SEQ ID NO: 99 - protein, 1307 aa, Artificial Sequence
  SYNTHETIC
MTQFEGFTNLYQVSKTLRFELIPQGKTLKHIQEQGFIEEDKARNDHYKELKPIIDRIYKTYADQCLQLVQLDWENLSAAIDSYRKEKTEETRNALIEEQATYRNAIHDYFIGRTDNLTDAINKRHAEIYKGLFKAELFNGKVLKQLGTVTTTEHENALLRSFDKFTTYFSGFYENRKNVFSAEDISTAIPHRIVQDNFPKFKENCHIFTRLITAVPSLREHFENVKKAIGIFVSTSIEEVFSFPFYNQLLTQTQIDLYNQLLGGISREAGTEKIKGLNEVLNLAIQKNDETAHIIASLPHRFIPLFKQILSDRNTLSFILEEFKSDEEVIQSFCKYKTLLRNENVLETAEALFNELNSIDLTHIFISHKKLETISSALCDHWDTLRNALYERRISELTGKITKSAKEKVQRSLKHEDINLQEIISAAGKELSEAFKQKTSEILSHAHAALDQPLPTTLKKQEEKEILKSQLDSLLGLYHLLDWFAVDESNEVDPEFSARLTGIKLEMLPSLSFYNKARNYATKKPYSVEKFKLNFQMPTLASGWDVNKEKNNGAILFVKNGLYYLGIMPKQKGRYKALSFEPTEKTSEGFDKMYYDYFPDAAKMIPKCSTQLKAVTAHFQTHTTPILLSNNFIEPLEITKEIYDLNNPEKEPKKFQTAYAKKTGDQKGYREALCKWIDFTRDFLSKYTKTTSIDLSSLRPSSQYKDLGEYYAELNPLLYHISFQRIAEKEIMDAVETGKLYLFQIYNKDFAKGHHGKPNLHTLYWTGLFSPENLAKTSIKLNGQAELFYRPKSRMKRMAHRLGEKMLNKKLKDQKTPIPDTLYQELYDYVNHRLSHDLSDEARALLPNVITKEVSHEIIKDRRFTSDKFFFHVPITLNYQAANSPSKFNQRVNAYLKEHPETPIIGIDRGERNLIYITVIDSTGKILEQRSLNTIQQFDYQKKLDNREKERVAARQAWSVVGTIKDLKQGYLSQVIHEIVDLMIHYQAVVVLENLNFGFKSKRTGIAEKAVYQQFEKMLIDKLNCLVLKDYPAEKVGGVLNPYQLTDQFTSFAKMGTQSGFLFYVPAPYTSKIDPLTGFVDPFVWKTIKNHESRKHFLEGFDFLHYDVKTGDFILHFKMNRNLSFQRGLPGFMPAWDIVFEKNETQFDAKGTPFIAGKRIVPVIENHRFTGRYRDLYPANELIALLEEKGIVFRDGSNILPKLLENDDSHAIDTMVALIRSVLQMRNSNAATGEDYINSPVRDLNGVCFDSRFQNPEWPMDADANGAYHIALKGQLLLNHLKESKDLKLQNGISNQDWLAYIQELRN

SEQ ID NO: 100 - protein, 1307 aa, Artificial Sequence
  SYNTHETIC
MTQFEGFTNLYQVSKTLRFELIPQGKTLKHIQEQGFIEEDKARNDHYKELKPIIDRIYKTYADQCLQLVQLDWENLSAAIDSYRKEKTEETRNALIEEQATYRNAIHDYFIGRTDNLTDAINKRHAEIYKGLFKAELFNGKVLKQLGTVTTTEHENALLRSFDKFTTYFSGFYENRKNVFSAEDISTAIPHRIVQDNFPKFKENCHIFTRLITAVPSLREHFENVKKAIGIFVSTSIEEVFSFPFYNQLLTQTQIDLYNQLLGGISREAGTEKIKGLNEVLNLAIQKNDETAHIIASLPHRFIPLFKQILSDRNTLSFILEEFKSDEEVIQSFCKYKTLLRNENVLETAEALFNELNSIDLTHIFISHKKLETISSALCDHWDTLRNALYERRISELTGKITKSAKEKVQRSLKHEDINLQEIISAAGKELSEAFKQKTSEILSHAHAALDQPLPTTLKKQEEKEILKSQLDSLLGLYHLLDWFAVDESNEVDPEFSARLTGIKLEMKPSLSFYNKARNYATKKPYSVEKFKLNFQMPTLASGWDVNKEKNNGAILFVKNGLYYLGIMPKQKGRYKALSFEPTEKTSEGFDKMYYDYFPDAAKMIPKCSTQLKAVTAHFQTHTTPILLSNNFIEPLEITKEIYDLNNPEKEPKKFQTAYAKKTGDQKGYREALCKWIDFTRDFLSKYTKTTSIDLSSLRPSSQYKDLGEYYAELNPLLYHISFQRIAEKEIMDAVETGKLYLFQIYNKDFAKGHHGKPNLHTLYWTGLFSPENLAKTSIKLNGQAELFYRPKSRMKRMAHRLGEKMLNKKLKDQKTPIPDTLYQELYDYVNHRLSHDLSDEARALLPNVITKEVSHEIIKDRRFTSDKFFFHVPITLNYQAANSPSKFNQRVNAYLKEHPETPIIGIDRGERNLIYITVIDSTGKILEQRSLNTIQQFDYQKKLDNREKERVAARQAWSVVGTIKDLKQGYLSQVIHEIVDLMIHYQAVVVLENLNFGFKSKRTGIAEKAVYQQFEKMLIDKLNCLVLKDYPAEKVGGVLNPYQLTDQFTSFAKMGTQSGFLFYVPAPYTSKIDPLTGFVDPFVWKTIKNHESRKHFLEGFDFLHYDVKTGDFILHFKMNRNLSFQRGLPGFMPAWDIVFEKNETQFDAKGTPFIAGKRIVPVIENHRFTGRYRDLYPANELIALLEEKGIVFRDGSNILPKLLENDDSHAIDTMVALIRSVLQMRNSNAATGEDYINSPVRDLNGVCFDSRFQNPEWPMDADANGAYHIALKGQLLLNHLKESKDLKLQNGISNQDWLAYIQELRN

SEQ ID NO: 101 - protein, 1307 aa, Artificial Sequence
  SYNTHETIC
MTQFEGFTNLYQVSKTLRFELIPQGKTLKHIQEQGFIEEDKARNDHYKELKPIIDRIYKTYADQCLQLVQLDWENLSAAIDSYRKEKTEETRNALIEEQATYRNAIHDYFIGRTDNLTDAINKRHAEIYKGLFKAELFNGKVLKQLGTVTTTEHENALLRSFDKFTTYFSGFYENRKNVFSAEDISTAIPHRIVQDNFPKFKENCHIFTRLITAVPSLREHFENVKKAIGIFVSTSIEEVFSFPFYNQLLTQTQIDLYNQLLGGISREAGTEKIKGLNEVLNLAIQKNDETAHIIASLPHRFIPLFKQILSDRNTLSFILEEFKSDEEVIQSFCKYKTLLRNENVLETAEALFNELNSIDLTHIFISHKKLETISSALCDHWDTLRNALYERRISELTGKITKSAKEKVQRSLKHEDINLQEIISAAGKELSEAFKQKTSEILSHAHAALDQPLPTTLKKQEEKEILKSQLDSLLGLYHLLDWFAVDESNEVDPEFSARLTGIKLEMMPSLSFYNKARNYATKKPYSVEKFKLNFQMPTLASGWDVNKEKNNGAILFVKNGLYYLGIMPKQKGRYKALSFEPTEKTSEGFDKMYYDYFPDAAKMIPKCSTQLKAVTAHFQTHTTPILLSNNFIEPLEITKEIYDLNNPEKEPKKFQTAYAKKTGDQKGYREALCKWIDFTRDFLSKYTKTTSIDLSSLRPSSQYKDLGEYYAELNPLLYHISFQRIAEKEIMDAVETGKLYLFQIYNKDFAKGHHGKPNLHTLYWTGLFSPENLAKTSIKLNGQAELFYRPKSRMKRMAHRLGEKMLNKKLKDQKTPIPDTLYQELYDYVNHRLSHDLSDEARALLPNVITKEVSHEIIKDRRFTSDKFFFHVPITLNYQAANSPSKFNQRVNAYLKEHPETPIIGIDRGERNLIYITVIDSTGKILEQRSLNTIQQFDYQKKLDNREKERVAARQAWSVVGTIKDLKQGYLSQVIHEIVDLMIHYQAVVVLENLNFGFKSKRTGIAEKAVYQQFEKMLIDKLNCLVLKDYPAEKVGGVLNPYQLTDQFTSFAKMGTQSGFLFYVPAPYTSKIDPLTGFVDPFVWKTIKNHESRKHFLEGFDFLHYDVKTGDFILHFKMNRNLSFQRGLPGFMPAWDIVFEKNETQFDAKGTPFIAGKRIVPVIENHRFTGRYRDLYPANELIALLEEKGIVFRDGSNILPKLLENDDSHAIDTMVALIRSVLQMRNSNAATGEDYINSPVRDLNGVCFDSRFQNPEWPMDADANGAYHIALKGQLLLNHLKESKDLKLQNGISNQDWLAYIQELRN

SEQ ID NO: 102 - protein, 1307 aa, Artificial Sequence
  SYNTHETIC
MTQFEGFTNLYQVSKTLRFELIPQGKTLKHIQEQGFIEEDKARNDHYKELKPIIDRIYKTYADQCLQLVQLDWENLSAAIDSYRKEKTEETRNALIEEQATYRNAIHDYFIGRTDNLTDAINKRHAEIYKGLFKAELFNGKVLKQLGTVTTTEHENALLRSFDKFTTYFSGFYENRKNVFSAEDISTAIPHRIVQDNFPKFKENCHIFTRLITAVPSLREHFENVKKAIGIFVSTSIEEVFSFPFYNQLLTQTQIDLYNQLLGGISREAGTEKIKGLNEVLNLAIQKNDETAHIIASLPHRFIPLFKQILSDRNTLSFILEEFKSDEEVIQSFCKYKTLLRNENVLETAEALFNELNSIDLTHIFISHKKLETISSALCDHWDTLRNALYERRISELTGKITKSAKEKVQRSLKHEDINLQEIISAAGKELSEAFKQKTSEILSHAHAALDQPLPTTLKKQEEKEILKSQLDSLLGLYHLLDWFAVDESNEVDPEFSARLTGIKLEMFPSLSFYNKARNYATKKPYSVEKFKLNFQMPTLASGWDVNKEKNNGAILFVKNGLYYLGIMPKQKGRYKALSFEPTEKTSEGFDKMYYDYFPDAAKMIPKCSTQLKAVTAHFQTHTTPILLSNNFIEPLEITKEIYDLNNPEKEPKKFQTAYAKKTGDQKGYREALCKWIDFTRDFLSKYTKTTSIDLSSLRPSSQYKDLGEYYAELNPLLYHISFQRIAEKEIMDAVETGKLYLFQIYNKDFAKGHHGKPNLHTLYWTGLFSPENLAKTSIKLNGQAELFYRPKSRMKRMAHRLGEKMLNKKLKDQKTPIPDTLYQELYDYVNHRLSHDLSDEARALLPNVITKEVSHEIIKDRRFTSDKFFFHVPITLNYQAANSPSKFNQRVNAYLKEHPETPIIGIDRGERNLIYITVIDSTGKILEQRSLNTIQQFDYQKKLDNREKERVAARQAWSVVGTIKDLKQGYLSQVIHEIVDLMIHYQAVVVLENLNFGFKSKRTGIAEKAVYQQFEKMLIDKLNCLVLKDYPAEKVGGVLNPYQLTDQFTSFAKMGTQSGFLFYVPAPYTSKIDPLTGFVDPFVWKTIKNHESRKHFLEGFDFLHYDVKTGDFILHFKMNRNLSFQRGLPGFMPAWDIVFEKNETQFDAKGTPFIAGKRIVPVIENHRFTGRYRDLYPANELIALLEEKGIVFRDGSNILPKLLENDDSHAIDTMVALIRSVLQMRNSNAATGEDYINSPVRDLNGVCFDSRFQNPEWPMDADANGAYHIALKGQLLLNHLKESKDLKLQNGISNQDWLAYIQELRN

SEQ ID NO: 103 - protein, 1307 aa, Artificial Sequence
  SYNTHETIC
MTQFEGFTNLYQVSKTLRFELIPQGKTLKHIQEQGFIEEDKARNDHYKELKPIIDRIYKTYADQCLQLVQLDWENLSAAIDSYRKEKTEETRNALIEEQATYRNAIHDYFIGRTDNLTDAINKRHAEIYKGLFKAELFNGKVLKQLGTVTTTEHENALLRSFDKFTTYFSGFYENRKNVFSAEDISTAIPHRIVQDNFPKFKENCHIFTRLITAVPSLREHFENVKKAIGIFVSTSIEEVFSFPFYNQLLTQTQIDLYNQLLGGISREAGTEKIKGLNEVLNLAIQKNDETAHIIASLPHRFIPLFKQILSDRNTLSFILEEFKSDEEVIQSFCKYKTLLRNENVLETAEALFNELNSIDLTHIFISHKKLETISSALCDHWDTLRNALYERRISELTGKITKSAKEKVQRSLKHEDINLQEIISAAGKELSEAFKQKTSEILSHAHAALDQPLPTTLKKQEEKEILKSQLDSLLGLYHLLDWFAVDESNEVDPEFSARLTGIKLEMSPSLSFYNKARNYATKKPYSVEKFKLNFQMPTLASGWDVNKEKNNGAILFVKNGLYYLGIMPKQKGRYKALSFEPTEKTSEGFDKMYYDYFPDAAKMIPKCSTQLKAVTAHFQTHTTPILLSNNFIEPLEITKEIYDLNNPEKEPKKFQTAYAKKTGDQKGYREALCKWIDFTRDFLSKYTKTTSIDLSSLRPSSQYKDLGEYYAELNPLLYHISFQRIAEKEIMDAVETGKLYLFQIYNKDFAKGHHGKPNLHTLYWTGLFSPENLAKTSIKLNGQAELFYRPKSRMKRMAHRLGEKMLNKKLKDQKTPIPDTLYQELYDYVNHRLSHDLSDEARALLPNVITKEVSHEIIKDRRFTSDKFFFHVPITLNYQAANSPSKFNQRVNAYLKEHPETPIIGIDRGERNLIYITVIDSTGKILEQRSLNTIQQFDYQKKLDNREKERVAARQAWSVVGTIKDLKQGYLSQVIHEIVDLMIHYQAVVVLENLNFGFKSKRTGIAEKAVYQQFEKMLIDKLNCLVLKDYPAEKVGGVLNPYQLTDQFTSFAKMGTQSGFLFYVPAPYTSKIDPLTGFVDPFVWKTIKNHESRKHFLEGFDFLHYDVKTGDFILHFKMNRNLSFQRGLPGFMPAWDIVFEKNETQFDAKGTPFIAGKRIVPVIENHRFTGRYRDLYPANELIALLEEKGIVFRDGSNILPKLLENDDSHAIDTMVALIRSVLQMRNSNAATGEDYINSPVRDLNGVCFDSRFQNPEWPMDADANGAYHIALKGQLLLNHLKESKDLKLQNGISNQDWLAYIQELRN

SEQ ID NO: 104 - protein, 1307 aa, Artificial Sequence
  SYNTHETIC
MTQFEGFTNLYQVSKTLRFELIPQGKTLKHIQEQGFIEEDKARNDHYKELKPIIDRIYKTYADQCLQLVQLDWENLSAAIDSYRKEKTEETRNALIEEQATYRNAIHDYFIGRTDNLTDAINKRHAEIYKGLFKAELFNGKVLKQLGTVTTTEHENALLRSFDKFTTYFSGFYENRKNVFSAEDISTAIPHRIVQDNFPKFKENCHIFTRLITAVPSLREHFENVKKAIGIFVSTSIEEVFSFPFYNQLLTQTQIDLYNQLLGGISREAGTEKIKGLNEVLNLAIQKNDETAHIIASLPHRFIPLFKQILSDRNTLSFILEEFKSDEEVIQSFCKYKTLLRNENVLETAEALFNELNSIDLTHIFISHKKLETISSALCDHWDTLRNALYERRISELTGKITKSAKEKVQRSLKHEDINLQEIISAAGKELSEAFKQKTSEILSHAHAALDQPLPTTLKKQEEKEILKSQLDSLLGLYHLLDWFAVDESNEVDPEFSARLTGIKLEMTPSLSFYNKARNYATKKPYSVEKFKLNFQMPTLASGWDVNKEKNNGAILFVKNGLYYLGIMPKQKGRYKALSFEPTEKTSEGFDKMYYDYFPDAAKMIPKCSTQLKAVTAHFQTHTTPILLSNNFIEPLEITKEIYDLNNPEKEPKKFQTAYAKKTGDQKGYREALCKWIDFTRDFLSKYTKTTSIDLSSLRPSSQYKDLGEYYAELNPLLYHISFQRIAEKEIMDAVETGKLYLFQIYNKDFAKGHHGKPNLHTLYWTGLFSPENLAKTSIKLNGQAELFYRPKSRMKRMAHRLGEKMLNKKLKDQKTPIPDTLYQELYDYVNHRLSHDLSDEARALLPNVITKEVSHEIIKDRRFTSDKFFFHVPITLNYQAANSPSKFNQRVNAYLKEHPETPIIGIDRGERNLIYITVIDSTGKILEQRSLNTIQQFDYQKKLDNREKERVAARQAWSVVGTIKDLKQGYLSQVIHEIVDLMIHYQAVVVLENLNFGFKSKRTGIAEKAVYQQFEKMLIDKLNCLVLKDYPAEKVGGVLNPYQLTDQFTSFAKMGTQSGFLFYVPAPYTSKIDPLTGFVDPFVWKTIKNHESRKHFLEGFDFLHYDVKTGDFILHFKMNRNLSFQRGLPGFMPAWDIVFEKNETQFDAKGTPFIAGKRIVPVIENHRFTGRYRDLYPANELIALLEEKGIVFRDGSNILPKLLENDDSHAIDTMVALIRSVLQMRNSNAATGEDYINSPVRDLNGVCFDSRFQNPEWPMDADANGAYHIALKGQLLLNHLKESKDLKLQNGISNQDWLAYIQELRN

SEQ ID NO: 105 - protein, 1307 aa, Artificial Sequence
  SYNTHETIC
MTQFEGFTNLYQVSKTLRFELIPQGKTLKHIQEQGFIEEDKARNDHYKELKPIIDRIYKTYADQCLQLVQLDWENLSAAIDSYRKEKTEETRNALIEEQATYRNAIHDYFIGRTDNLTDAINKRHAEIYKGLFKAELFNGKVLKQLGTVTTTEHENALLRSFDKFTTYFSGFYENRKNVFSAEDISTAIPHRIVQDNFPKFKENCHIFTRLITAVPSLREHFENVKKAIGIFVSTSIEEVFSFPFYNQLLTQTQIDLYNQLLGGISREAGTEKIKGLNEVLNLAIQKNDETAHIIASLPHRFIPLFKQILSDRNTLSFILEEFKSDEEVIQSFCKYKTLLRNENVLETAEALFNELNSIDLTHIFISHKKLETISSALCDHWDTLRNALYERRISELTGKITKSAKEKVQRSLKHEDINLQEIISAAGKELSEAFKQKTSEILSHAHAALDQPLPTTLKKQEEKEILKSQLDSLLGLYHLLDWFAVDESNEVDPEFSARLTGIKLEMYPSLSFYNKARNYATKKPYSVEKFKLNFQMPTLASGWDVNKEKNNGAILFVKNGLYYLGIMPKQKGRYKALSFEPTEKTSEGFDKMYYDYFPDAAKMIPKCSTQLKAVTAHFQTHTTPILLSNNFIEPLEITKEIYDLNNPEKEPKKFQTAYAKKTGDQKGYREALCKWIDFTRDFLSKYTKTTSIDLSSLRPSSQYKDLGEYYAELNPLLYHISFQRIAEKEIMDAVETGKLYLFQIYNKDFAKGHHGKPNLHTLYWTGLFSPENLAKTSIKLNGQAELFYRPKSRMKRMAHRLGEKMLNKKLKDQKTPIPDTLYQELYDYVNHRLSHDLSDEARALLPNVITKEVSHEIIKDRRFTSDKFFFHVPITLNYQAANSPSKFNQRVNAYLKEHPETPIIGIDRGERNLIYITVIDSTGKILEQRSLNTIQQFDYQKKLDNREKERVAARQAWSVVGTIKDLKQGYLSQVIHEIVDLMIHYQAVVVLENLNFGFKSKRTGIAEKAVYQQFEKMLIDKLNCLVLKDYPAEKVGGVLNPYQLTDQFTSFAKMGTQSGFLFYVPAPYTSKIDPLTGFVDPFVWKTIKNHESRKHFLEGFDFLHYDVKTGDFILHFKMNRNLSFQRGLPGFMPAWDIVFEKNETQFDAKGTPFIAGKRIVPVIENHRFTGRYRDLYPANELIALLEEKGIVFRDGSNILPKLLENDDSHAIDTMVALIRSVLQMRNSNAATGEDYINSPVRDLNGVCFDSRFQNPEWPMDADANGAYHIALKGQLLLNHLKESKDLKLQNGISNQDWLAYIQELRN

SEQ ID NO: 106 - protein, 1307 aa, Artificial Sequence
  SYNTHETIC
MTQFEGFTNLYQVSKTLRFELIPQGKTLKHIQEQGFIEEDKARNDHYKELKPIIDRIYKTYADQCLQLVQLDWENLSAAIDSYRKEKTEETRNALIEEQATYRNAIHDYFIGRTDNLTDAINKRHAEIYKGLFKAELFNGKVLKQLGTVTTTEHENALLRSFDKFTTYFSGFYENRKNVFSAEDISTAIPHRIVQDNFPKFKENCHIFTRLITAVPSLREHFENVKKAIGIFVSTSIEEVFSFPFYNQLLTQTQIDLYNQLLGGISREAGTEKIKGLNEVLNLAIQKNDETAHIIASLPHRFIPLFKQILSDRNTLSFILEEFKSDEEVIQSFCKYKTLLRNENVLETAEALFNELNSIDLTHIFISHKKLETISSALCDHWDTLRNALYERRISELTGKITKSAKEKVQRSLKHEDINLQEIISAAGKELSEAFKQKTSEILSHAHAALDQPLPTTLKKQEEKEILKSQLDSLLGLYHLLDWFAVDESNEVDPEFSARLTGIKLEMVPSLSFYNKARNYATKKPYSVEKFKLNFQMPTLASGWDVNKEKNNGAILFVKNGLYYLGIMPKQKGRYKALSFEPTEKTSEGFDKMYYDYFPDAAKMIPKCSTQLKAVTAHFQTHTTPILLSNNFIEPLEITKEIYDLNNPEKEPKKFQTAYAKKTGDQKGYREALCKWIDFTRDFLSKYTKTTSIDLSSLRPSSQYKDLGEYYAELNPLLYHISFQRIAEKEIMDAVETGKLYLFQIYNKDFAKGHHGKPNLHTLYWTGLFSPENLAKTSIKLNGQAELFYRPKSRMKRMAHRLGEKMLNKKLKDQKTPIPDTLYQELYDYVNHRLSHDLSDEARALLPNVITKEVSHEIIKDRRFTSDKFFFHVPITLNYQAANSPSKFNQRVNAYLKEHPETPIIGIDRGERNLIYITVIDSTGKILEQRSLNTIQQFDYQKKLDNREKERVAARQAWSVVGTIKDLKQGYLSQVIHEIVDLMIHYQAVVVLENLNFGFKSKRTGIAEKAVYQQFEKMLIDKLNCLVLKDYPAEKVGGVLNPYQLTDQFTSFAKMGTQSGFLFYVPAPYTSKIDPLTGFVDPFVWKTIKNHESRKHFLEGFDFLHYDVKTGDFILHFKMNRNLSFQRGLPGFMPAWDIVFEKNETQFDAKGTPFIAGKRIVPVIENHRFTGRYRDLYPANELIALLEEKGIVFRDGSNILPKLLENDDSHAIDTMVALIRSVLQMRNSNAATGEDYINSPVRDLNGVCFDSRFQNPEWPMDADANGAYHIALKGQLLLNHLKESKDLKLQNGISNQDWLAYIQELRN

SEQ ID NO: 107 - protein, 1307 aa, Artificial Sequence
  SYNTHETIC
MTQFEGFTNLYQVSKTLRFELIPQGKTLKHIQEQGFIEEDKARNDHYKELKPIIDRIYKTYADQCLQLVQLDWENLSAAIDSYRKEKTEETRNALIEEQATYRNAIHDYFIGRTDNLTDAINKRHAEIYKGLFKAELFNGKVLKQLGTVTTTEHENALLRSFDKFTTYFSGFYENRKNVFSAEDISTAIPHRIVQDNFPKFKENCHIFTRLITAVPSLREHFENVKKAIGIFVSTSIEEVFSFPFYNQLLTQTQIDLYNQLLGGISREAGTEKIKGLNEVLNLAIQKNDETAHIIASLPHRFIPLFKQILSDRNTLSFILEEFKSDEEVIQSFCKYKTLLRNENVLETAEALFNELNSIDLTHIFISHKKLETISSALCDHWDTLRNALYERRISELTGKITKSAKEKVQRSLKHEDINLQEIISAAGKELSEAFKQKTSEILSHAHAALDQPLPTTLKKQEEKEILKSQLDSLLGLYHLLDWFAVDESNEVDPEFSARLTGIKLEMERSLSFYNKARNYATKKPYSVEKFKLNFQMPTLASGWDVNKEKNNGAILFVKNGLYYLGIMPKQKGRYKALSFEPTEKTSEGFDKMYYDYFPDAAKMIPKCSTQLKAVTAHFQTHTTPILLSNNFIEPLEITKEIYDLNNPEKEPKKFQTAYAKKTGDQKGYREALCKWIDFTRDFLSKYTKTTSIDLSSLRPSSQYKDLGEYYAELNPLLYHISFQRIAEKEIMDAVETGKLYLFQIYNKDFAKGHHGKPNLHTLYWTGLFSPENLAKTSIKLNGQAELFYRPKSRMKRMAHRLGEKMLNKKLKDQKTPIPDTLYQELYDYVNHRLSHDLSDEARALLPNVITKEVSHEIIKDRRFTSDKFFFHVPITLNYQAANSPSKFNQRVNAYLKEHPETPIIGIDRGERNLIYITVIDSTGKILEQRSLNTIQQFDYQKKLDNREKERVAARQAWSVVGTIKDLKQGYLSQVIHEIVDLMIHYQAVVVLENLNFGFKSKRTGIAEKAVYQQFEKMLIDKLNCLVLKDYPAEKVGGVLNPYQLTDQFTSFAKMGTQSGFLFYVPAPYTSKIDPLTGFVDPFVWKTIKNHESRKHFLEGFDFLHYDVKTGDFILHFKMNRNLSFQRGLPGFMPAWDIVFEKNETQFDAKGTPFIAGKRIVPVIENHRFTGRYRDLYPANELIALLEEKGIVFRDGSNILPKLLENDDSHAIDTMVALIRSVLQMRNSNAATGEDYINSPVRDLNGVCFDSRFQNPEWPMDADANGAYHIALKGQLLLNHLKESKDLKLQNGISNQDWLAYIQELRN

SEQ ID NO: 108 - protein, 1307 aa, Artificial Sequence
  SYNTHETIC
MTQFEGFTNLYQVSKTLRFELIPQGKTLKHIQEQGFIEEDKARNDHYKELKPIIDRIYKTYADQCLQLVQLDWENLSAAIDSYRKEKTEETRNALIEEQATYRNAIHDYFIGRTDNLTDAINKRHAEIYKGLFKAELFNGKVLKQLGTVTTTEHENALLRSFDKFTTYFSGFYENRKNVFSAEDISTAIPHRIVQDNFPKFKENCHIFTRLITAVPSLREHFENVKKAIGIFVSTSIEEVFSFPFYNQLLTQTQIDLYNQLLGGISREAGTEKIKGLNEVLNLAIQKNDETAHIIASLPHRFIPLFKQILSDRNTLSFILEEFKSDEEVIQSFCKYKTLLRNENVLETAEALFNELNSIDLTHIFISHKKLETISSALCDHWDTLRNALYERRISELTGKITKSAKEKVQRSLKHEDINLQEIISAAGKELSEAFKQKTSEILSHAHAALDQPLPTTLKKQEEKEILKSQLDSLLGLYHLLDWFAVDESNEVDPEFSARLTGIKLEMEKSLSFYNKARNYATKKPYSVEKFKLNFQMPTLASGWDVNKEKNNGAILFVKNGLYYLGIMPKQKGRYKALSFEPTEKTSEGFDKMYYDYFPDAAKMIPKCSTQLKAVTAHFQTHTTPILLSNNFIEPLEITKEIYDLNNPEKEPKKFQTAYAKKTGDQKGYREALCKWIDFTRDFLSKYTKTTSIDLSSLRPSSQYKDLGEYYAELNPLLYHISFQRIAEKEIMDAVETGKLYLFQIYNKDFAKGHHGKPNLHTLYWTGLFSPENLAKTSIKLNGQAELFYRPKSRMKRMAHRLGEKMLNKKLKDQKTPIPDTLYQELYDYVNHRLSHDLSDEARALLPNVITKEVSHEIIKDRRFTSDKFFFHVPITLNYQAANSPSKFNQRVNAYLKEHPETPIIGIDRGERNLIYITVIDSTGKILEQRSLNTIQQFDYQKKLDNREKERVAARQAWSVVGTIKDLKQGYLSQVIHEIVDLMIHYQAVVVLENLNFGFKSKRTGIAEKAVYQQFEKMLIDKLNCLVLKDYPAEKVGGVLNPYQLTDQFTSFAKMGTQSGFLFYVPAPYTSKIDPLTGFVDPFVWKTIKNHESRKHFLEGFDFLHYDVKTGDFILHFKMNRNLSFQRGLPGFMPAWDIVFEKNETQFDAKGTPFIAGKRIVPVIENHRFTGRYRDLYPANELIALLEEKGIVFRDGSNILPKLLENDDSHAIDTMVALIRSVLQMRNSNAATGEDYINSPVRDLNGVCFDSRFQNPEWPMDADANGAYHIALKGQLLLNHLKESKDLKLQNGISNQDWLAYIQELRN

SEQ ID NO: 109 - protein, 1307 aa, Artificial Sequence
  SYNTHETIC
MTQFEGFTNLYQVSKTLRFELIPQGKTLKHIQEQGFIEEDKARNDHYKELKPIIDRIYKTYADQCLQLVQLDWENLSAAIDSYRKEKTEETRNALIEEQATYRNAIHDYFIGRTDNLTDAINKRHAEIYKGLFKAELFNGKVLKQLGTVTTTEHENALLRSFDKFTTYFSGFYENRKNVFSAEDISTAIPHRIVQDNFPKFKENCHIFTRLITAVPSLREHFENVKKAIGIFVSTSIEEVFSFPFYNQLLTQTQIDLYNQLLGGISREAGTEKIKGLNEVLNLAIQKNDETAHIIASLPHRFIPLFKQILSDRNTLSFILEEFKSDEEVIQSFCKYKTLLRNENVLETAEALFNELNSIDLTHIFISHKKLETISSALCDHWDTLRNALYERRISELTGKITKSAKEKVQRSLKHEDINLQEIISAAGKELSEAFKQKTSEILSHAHAALDQPLPTTLKKQEEKEILKSQLDSLLGLYHLLDWFAVDESNEVDPEFSARLTGIKLEMEMSLSFYNKARNYATKKPYSVEKFKLNFQMPTLASGWDVNKEKNNGAILFVKNGLYYLGIMPKQKGRYKALSFEPTEKTSEGFDKMYYDYFPDAAKMIPKCSTQLKAVTAHFQTHTTPILLSNNFIEPLEITKEIYDLNNPEKEPKKFQTAYAKKTGDQKGYREALCKWIDFTRDFLSKYTKTTSIDLSSLRPSSQYKDLGEYYAELNPLLYHISFQRIAEKEIMDAVETGKLYLFQIYNKDFAKGHHGKPNLHTLYWTGLFSPENLAKTSIKLNGQAELFYRPKSRMKRMAHRLGEKMLNKKLKDQKTPIPDTLYQELYDYVNHRLSHDLSDEARALLPNVITKEVSHEIIKDRRFTSDKFFFHVPITLNYQAANSPSKFNQRVNAYLKEHPETPIIGIDRGERNLIYITVIDSTGKILEQRSLNTIQQFDYQKKLDNREKERVAARQAWSVVGTIKDLKQGYLSQVIHEIVDLMIHYQAVVVLENLNFGFKSKRTGIAEKAVYQQFEKMLIDKLNCLVLKDYPAEKVGGVLNPYQLTDQFTSFAKMGTQSGFLFYVPAPYTSKIDPLTGFVDPFVWKTIKNHESRKHFLEGFDFLHYDVKTGDFILHFKMNRNLSFQRGLPGFMPAWDIVFEKNETQFDAKGTPFIAGKRIVPVIENHRFTGRYRDLYPANELIALLEEKGIVFRDGSNILPKLLENDDSHAIDTMVALIRSVLQMRNSNAATGEDYINSPVRDLNGVCFDSRFQNPEWPMDADANGAYHIALKGQLLLNHLKESKDLKLQNGISNQDWLAYIQELRN

SEQ ID NO: 110 - protein, 1307 aa, Artificial Sequence
  SYNTHETIC
MTQFEGFTNLYQVSKTLRFELIPQGKTLKHIQEQGFIEEDKARNDHYKELKPIIDRIYKTYADQCLQLVQLDWENLSAAIDSYRKEKTEETRNALIEEQATYRNAIHDYFIGRTDNLTDAINKRHAEIYKGLFKAELFNGKVLKQLGTVTTTEHENALLRSFDKFTTYFSGFYENRKNVFSAEDISTAIPHRIVQDNFPKFKENCHIFTRLITAVPSLREHFENVKKAIGIFVSTSIEEVFSFPFYNQLLTQTQIDLYNQLLGGISREAGTEKIKGLNEVLNLAIQKNDETAHIIASLPHRFIPLFKQILSDRNTLSFILEEFKSDEEVIQSFCKYKTLLRNENVLETAEALFNELNSIDLTHIFISHKKLETISSALCDHWDTLRNALYERRISELTGKITKSAKEKVQRSLKHEDINLQEIISAAGKELSEAFKQKTSEILSHAHAALDQPLPTTLKKQEEKEILKSQLDSLLGLYHLLDWFAVDESNEVDPEFSARLTGIKLEMESSLSFYNKARNYATKKPYSVEKFKLNFQMPTLASGWDVNKEKNNGAILFVKNGLYYLGIMPKQKGRYKALSFEPTEKTSEGFDKMYYDYFPDAAKMIPKCSTQLKAVTAHFQTHTTPILLSNNFIEPLEITKEIYDLNNPEKEPKKFQTAYAKKTGDQKGYREALCKWIDFTRDFLSKYTKTTSIDLSSLRPSSQYKDLGEYYAELNPLLYHISFQRIAEKEIMDAVETGKLYLFQIYNKDFAKGHHGKPNLHTLYWTGLFSPENLAKTSIKLNGQAELFYRPKSRMKRMAHRLGEKMLNKKLKDQKTPIPDTLYQELYDYVNHRLSHDLSDEARALLPNVITKEVSHEIIKDRRFTSDKFFFHVPITLNYQAANSPSKFNQRVNAYLKEHPETPIIGIDRGERNLIYITVIDSTGKILEQRSLNTIQQFDYQKKLDNREKERVAARQAWSVVGTIKDLKQGYLSQVIHEIVDLMIHYQAVVVLENLNFGFKSKRTGIAEKAVYQQFEKMLIDKLNCLVLKDYPAEKVGGVLNPYQLTDQFTSFAKMGTQSGFLFYVPAPYTSKIDPLTGFVDPFVWKTIKNHESRKHFLEGFDFLHYDVKTGDFILHFKMNRNLSFQRGLPGFMPAWDIVFEKNETQFDAKGTPFIAGKRIVPVIENHRFTGRYRDLYPANELIALLEEKGIVFRDGSNILPKLLENDDSHAIDTMVALIRSVLQMRNSNAATGEDYINSPVRDLNGVCFDSRFQNPEWPMDADANGAYHIALKGQLLLNHLKESKDLKLQNGISNQDWLAYIQELRN

SEQ ID NO: 111 - protein, 1307 aa, Artificial Sequence
  SYNTHETIC
MTQFEGFTNLYQVSKTLRFELIPQGKTLKHIQEQGFIEEDKARNDHYKELKPIIDRIYKTYADQCLQLVQLDWENLSAAIDSYRKEKTEETRNALIEEQATYRNAIHDYFIGRTDNLTDAINKRHAEIYKGLFKAELFNGKVLKQLGTVTTTEHENALLRSFDKFTTYFSGFYENRKNVFSAEDISTAIPHRIVQDNFPKFKENCHIFTRLITAVPSLREHFENVKKAIGIFVSTSIEEVFSFPFYNQLLTQTQIDLYNQLLGGISREAGTEKIKGLNEVLNLAIQKNDETAHIIASLPHRFIPLFKQILSDRNTLSFILEEFKSDEEVIQSFCKYKTLLRNENVLETAEALFNELNSIDLTHIFISHKKLETISSALCDHWDTLRNALYERRISELTGKITKSAKEKVQRSLKHEDINLQEIISAAGKELSEAFKQKTSEILSHAHAALDQPLPTTLKKQEEKEILKSQLDSLLGLYHLLDWFAVDESNEVDPEFSARLTGIKLEMEWSLSFYNKARNYATKKPYSVEKFKLNFQMPTLASGWDVNKEKNNGAILFVKNGLYYLGIMPKQKGRYKALSFEPTEKTSEGFDKMYYDYFPDAAKMIPKCSTQLKAVTAHFQTHTTPILLSNNFIEPLEITKEIYDLNNPEKEPKKFQTAYAKKTGDQKGYREALCKWIDFTRDFLSKYTKTTSIDLSSLRPSSQYKDLGEYYAELNPLLYHISFQRIAEKEIMDAVETGKLYLFQIYNKDFAKGHHGKPNLHTLYWTGLFSPENLAKTSIKLNGQAELFYRPKSRMKRMAHRLGEKMLNKKLKDQKTPIPDTLYQELYDYVNHRLSHDLSDEARALLPNVITKEVSHEIIKDRRFTSDKFFFHVPITLNYQAANSPSKFNQRVNAYLKEHPETPIIGIDRGERNLIYITVIDSTGKILEQRSLNTIQQFDYQKKLDNREKERVAARQAWSVVGTIKDLKQGYLSQVIHEIVDLMIHYQAVVVLENLNFGFKSKRTGIAEKAVYQQFEKMLIDKLNCLVLKDYPAEKVGGVLNPYQLTDQFTSFAKMGTQSGFLFYVPAPYTSKIDPLTGFVDPFVWKTIKNHESRKHFLEGFDFLHYDVKTGDFILHFKMNRNLSFQRGLPGFMPAWDIVFEKNETQFDAKGTPFIAGKRIVPVIENHRFTGRYRDLYPANELIALLEEKGIVFRDGSNILPKLLENDDSHAIDTMVALIRSVLQMRNSNAATGEDYINSPVRDLNGVCFDSRFQNPEWPMDADANGAYHIALKGQLLLNHLKESKDLKLQNGISNQDWLAYIQELRN

SEQ ID NO: 112 - protein, 1307 aa, Artificial Sequence
  SYNTHETIC
MTQFEGFTNLYQVSKTLRFELIPQGKTLKHIQEQGFIEEDKARNDHYKELKPIIDRIYKTYADQCLQLVQLDWENLSAAIDSYRKEKTEETRNALIEEQATYRNAIHDYFIGRTDNLTDAINKRHAEIYKGLFKAELFNGKVLKQLGTVTTTEHENALLRSFDKFTTYFSGFYENRKNVFSAEDISTAIPHRIVQDNFPKFKENCHIFTRLITAVPSLREHFENVKKAIGIFVSTSIEEVFSFPFYNQLLTQTQIDLYNQLLGGISREAGTEKIKGLNEVLNLAIQKNDETAHIIASLPHRFIPLFKQILSDRNTLSFILEEFKSDEEVIQSFCKYKTLLRNENVLETAEALFNELNSIDLTHIFISHKKLETISSALCDHWDTLRNALYERRISELTGKITKSAKEKVQRSLKHEDINLQEIISAAGKELSEAFKQKTSEILSHAHAALDQPLPTTLKKQEEKEILKSQLDSLLGLYHLLDWFAVDESNEVDPEFSARLTGIKLEMEYSLSFYNKARNYATKKPYSVEKFKLNFQMPTLASGWDVNKEKNNGAILFVKNGLYYLGIMPKQKGRYKALSFEPTEKTSEGFDKMYYDYFPDAAKMIPKCSTQLKAVTAHFQTHTTPILLSNNFIEPLEITKEIYDLNNPEKEPKKFQTAYAKKTGDQKGYREALCKWIDFTRDFLSKYTKTTSIDLSSLRPSSQYKDLGEYYAELNPLLYHISFQRIAEKEIMDAVETGKLYLFQIYNKDFAKGHHGKPNLHTLYWTGLFSPENLAKTSIKLNGQAELFYRPKSRMKRMAHRLGEKMLNKKLKDQKTPIPDTLYQELYDYVNHRLSHDLSDEARALLPNVITKEVSHEIIKDRRFTSDKFFFHVPITLNYQAANSPSKFNQRVNAYLKEHPETPIIGIDRGERNLIYITVIDSTGKILEQRSLNTIQQFDYQKKLDNREKERVAARQAWSVVGTIKDLKQGYLSQVIHEIVDLMIHYQAVVVLENLNFGFKSKRTGIAEKAVYQQFEKMLIDKLNCLVLKDYPAEKVGGVLNPYQLTDQFTSFAKMGTQSGFLFYVPAPYTSKIDPLTGFVDPFVWKTIKNHESRKHFLEGFDFLHYDVKTGDFILHFKMNRNLSFQRGLPGFMPAWDIVFEKNETQFDAKGTPFIAGKRIVPVIENHRFTGRYRDLYPANELIALLEEKGIVFRDGSNILPKLLENDDSHAIDTMVALIRSVLQMRNSNAATGEDYINSPVRDLNGVCFDSRFQNPEWPMDADANGAYHIALKGQLLLNHLKESKDLKLQNGISNQDWLAYIQELRN

SEQ ID NO: 113 - protein, 1307 aa, Artificial Sequence
  SYNTHETIC
MTQFEGFTNLYQVSKTLRFELIPQGKTLKHIQEQGFIEEDKARNDHYKELKPIIDRIYKTYADQCLQLVQLDWENLSAAIDSYRKEKTEETRNALIEEQATYRNAIHDYFIGRTDNLTDAINKRHAEIYKGLFKAELFNGKVLKQLGTVTTTEHENALLRSFDKFTTYFSGFYENRKNVFSAEDISTAIPHRIVQDNFPKFKENCHIFTRLITAVPSLREHFENVKKAIGIFVSTSIEEVFSFPFYNQLLTQTQIDLYNQLLGGISREAGTEKIKGLNEVLNLAIQKNDETAHIIASLPHRFIPLFKQILSDRNTLSFILEEFKSDEEVIQSFCKYKTLLRNENVLETAEALFNELNSIDLTHIFISHKKLETISSALCDHWDTLRNALYERRISELTGKITKSAKEKVQRSLKHEDINLQEIISAAGKELSEAFKQKTSEILSHAHAALDQPLPTTLKKQEEKEILKSQLDSLLGLYHLLDWFAVDESNEVDPEFSARLTGIKLEMEPGLSFYNKARNYATKKPYSVEKFKLNFQMPTLASGWDVNKEKNNGAILFVKNGLYYLGIMPKQKGRYKALSFEPTEKTSEGFDKMYYDYFPDAAKMIPKCSTQLKAVTAHFQTHTTPILLSNNFIEPLEITKEIYDLNNPEKEPKKFQTAYAKKTGDQKGYREALCKWIDFTRDFLSKYTKTTSIDLSSLRPSSQYKDLGEYYAELNPLLYHISFQRIAEKEIMDAVETGKLYLFQIYNKDFAKGHHGKPNLHTLYWTGLFSPENLAKTSIKLNGQAELFYRPKSRMKRMAHRLGEKMLNKKLKDQKTPIPDTLYQELYDYVNHRLSHDLSDEARALLPNVITKEVSHEIIKDRRFTSDKFFFHVPITLNYQAANSPSKFNQRVNAYLKEHPETPIIGIDRGERNLIYITVIDSTGKILEQRSLNTIQQFDYQKKLDNREKERVAARQAWSVVGTIKDLKQGYLSQVIHEIVDLMIHYQAVVVLENLNFGFKSKRTGIAEKAVYQQFEKMLIDKLNCLVLKDYPAEKVGGVLNPYQLTDQFTSFAKMGTQSGFLFYVPAPYTSKIDPLTGFVDPFVWKTIKNHESRKHFLEGFDFLHYDVKTGDFILHFKMNRNLSFQRGLPGFMPAWDIVFEKNETQFDAKGTPFIAGKRIVPVIENHRFTGRYRDLYPANELIALLEEKGIVFRDGSNILPKLLENDDSHAIDTMVALIRSVLQMRNSNAATGEDYINSPVRDLNGVCFDSRFQNPEWPMDADANGAYHIALKGQLLLNHLKESKDLKLQNGISNQDWLAYIQELRN

SEQ ID NO: 114 - protein, 1307 aa, Artificial Sequence
  SYNTHETIC
MTQFEGFTNLYQVSKTLRFELIPQGKTLKHIQEQGFIEEDKARNDHYKELKPIIDRIYKTYADQCLQLVQLDWENLSAAIDSYRKEKTEETRNALIEEQATYRNAIHDYFIGRTDNLTDAINKRHAEIYKGLFKAELFNGKVLKQLGTVTTTEHENALLRSFDKFTTYFSGFYENRKNVFSAEDISTAIPHRIVQDNFPKFKENCHIFTRLITAVPSLREHFENVKKAIGIFVSTSIEEVFSFPFYNQLLTQTQIDLYNQLLGGISREAGTEKIKGLNEVLNLAIQKNDETAHIIASLPHRFIPLFKQILSDRNTLSFILEEFKSDEEVIQSFCKYKTLLRNENVLETAEALFNELNSIDLTHIFISHKKLETISSALCDHWDTLRNALYERRISELTGKITKSAKEKVQRSLKHEDINLQEIISAAGKELSEAFKQKTSEILSHAHAALDQPLPTTLKKQEEKEILKSQLDSLLGLYHLLDWFAVDESNEVDPEFSARLTGIKLEMEPLLSFYNKARNYATKKPYSVEKFKLNFQMPTLASGWDVNKEKNNGAILFVKNGLYYLGIMPKQKGRYKALSFEPTEKTSEGFDKMYYDYFPDAAKMIPKCSTQLKAVTAHFQTHTTPILLSNNFIEPLEITKEIYDLNNPEKEPKKFQTAYAKKTGDQKGYREALCKWIDFTRDFLSKYTKTTSIDLSSLRPSSQYKDLGEYYAELNPLLYHISFQRIAEKEIMDAVETGKLYLFQIYNKDFAKGHHGKPNLHTLYWTGLFSPENLAKTSIKLNGQAELFYRPKSRMKRMAHRLGEKMLNKKLKDQKTPIPDTLYQELYDYVNHRLSHDLSDEARALLPNVITKEVSHEIIKDRRFTSDKFFFHVPITLNYQAANSPSKFNQRVNAYLKEHPETPIIGIDRGERNLIYITVIDSTGKILEQRSLNTIQQFDYQKKLDNREKERVAARQAWSVVGTIKDLKQGYLSQVIHEIVDLMIHYQAVVVLENLNFGFKSKRTGIAEKAVYQQFEKMLIDKLNCLVLKDYPAEKVGGVLNPYQLTDQFTSFAKMGTQSGFLFYVPAPYTSKIDPLTGFVDPFVWKTIKNHESRKHFLEGFDFLHYDVKTGDFILHFKMNRNLSFQRGLPGFMPAWDIVFEKNETQFDAKGTPFIAGKRIVPVIENHRFTGRYRDLYPANELIALLEEKGIVFRDGSNILPKLLENDDSHAIDTMVALIRSVLQMRNSNAATGEDYINSPVRDLNGVCFDSRFQNPEWPMDADANGAYHIALKGQLLLNHLKESKDLKLQNGISNQDWLAYIQELRN

SEQ ID NO: 115 - protein, 1307 aa, Artificial Sequence
  SYNTHETIC
MTQFEGFTNLYQVSKTLRFELIPQGKTLKHIQEQGFIEEDKARNDHYKELKPIIDRIYKTYADQCLQLVQLDWENLSAAIDSYRKEKTEETRNALIEEQATYRNAIHDYFIGRTDNLTDAINKRHAEIYKGLFKAELFNGKVLKQLGTVTTTEHENALLRSFDKFTTYFSGFYENRKNVFSAEDISTAIPHRIVQDNFPKFKENCHIFTRLITAVPSLREHFENVKKAIGIFVSTSIEEVFSFPFYNQLLTQTQIDLYNQLLGGISREAGTEKIKGLNEVLNLAIQKNDETAHIIASLPHRFIPLFKQILSDRNTLSFILEEFKSDEEVIQSFCKYKTLLRNENVLETAEALFNELNSIDLTHIFISHKKLETISSALCDHWDTLRNALYERRISELTGKITKSAKEKVQRSLKHEDINLQEIISAAGKELSEAFKQKTSEILSHAHAALDQPLPTTLKKQEEKEILKSQLDSLLGLYHLLDWFAVDESNEVDPEFSARLTGIKLEMEPSLRFYNKARNYATKKPYSVEKFKLNFQMPTLASGWDVNKEKNNGAILFVKNGLYYLGIMPKQKGRYKALSFEPTEKTSEGFDKMYYDYFPDAAKMIPKCSTQLKAVTAHFQTHTTPILLSNNFIEPLEITKEIYDLNNPEKEPKKFQTAYAKKTGDQKGYREALCKWIDFTRDFLSKYTKTTSIDLSSLRPSSQYKDLGEYYAELNPLLYHISFQRIAEKEIMDAVETGKLYLFQIYNKDFAKGHHGKPNLHTLYWTGLFSPENLAKTSIKLNGQAELFYRPKSRMKRMAHRLGEKMLNKKLKDQKTPIPDTLYQELYDYVNHRLSHDLSDEARALLPNVITKEVSHEIIKDRRFTSDKFFFHVPITLNYQAANSPSKFNQRVNAYLKEHPETPIIGIDRGERNLIYITVIDSTGKILEQRSLNTIQQFDYQKKLDNREKERVAARQAWSVVGTIKDLKQGYLSQVIHEIVDLMIHYQAVVVLENLNFGFKSKRTGIAEKAVYQQFEKMLIDKLNCLVLKDYPAEKVGGVLNPYQLTDQFTSFAKMGTQSGFLFYVPAPYTSKIDPLTGFVDPFVWKTIKNHESRKHFLEGFDFLHYDVKTGDFILHFKMNRNLSFQRGLPGFMPAWDIVFEKNETQFDAKGTPFIAGKRIVPVIENHRFTGRYRDLYPANELIALLEEKGIVFRDGSNILPKLLENDDSHAIDTMVALIRSVLQMRNSNAATGEDYINSPVRDLNGVCFDSRFQNPEWPMDADANGAYHIALKGQLLLNHLKESKDLKLQNGISNQDWLAYIQELRN

SEQ ID NO: 116 - protein, 1307 aa, Artificial Sequence
  SYNTHETIC
MTQFEGFTNLYQVSKTLRFELIPQGKTLKHIQEQGFIEEDKARNDHYKELKPIIDRIYKTYADQCLQLVQLDWENLSAAIDSYRKEKTEETRNALIEEQATYRNAIHDYFIGRTDNLTDAINKRHAEIYKGLFKAELFNGKVLKQLGTVTTTEHENALLRSFDKFTTYFSGFYENRKNVFSAEDISTAIPHRIVQDNFPKFKENCHIFTRLITAVPSLREHFENVKKAIGIFVSTSIEEVFSFPFYNQLLTQTQIDLYNQLLGGISREAGTEKIKGLNEVLNLAIQKNDETAHIIASLPHRFIPLFKQILSDRNTLSFILEEFKSDEEVIQSFCKYKTLLRNENVLETAEALFNELNSIDLTHIFISHKKLETISSALCDHWDTLRNALYERRISELTGKITKSAKEKVQRSLKHEDINLQEIISAAGKELSEAFKQKTSEILSHAHAALDQPLPTTLKKQEEKEILKSQLDSLLGLYHLLDWFAVDESNEVDPEFSARLTGIKLEMEPSLSLYNKARNYATKKPYSVEKFKLNFQMPTLASGWDVNKEKNNGAILFVKNGLYYLGIMPKQKGRYKALSFEPTEKTSEGFDKMYYDYFPDAAKMIPKCSTQLKAVTAHFQTHTTPILLSNNFIEPLEITKEIYDLNNPEKEPKKFQTAYAKKTGDQKGYREALCKWIDFTRDFLSKYTKTTSIDLSSLRPSSQYKDLGEYYAELNPLLYHISFQRIAEKEIMDAVETGKLYLFQIYNKDFAKGHHGKPNLHTLYWTGLFSPENLAKTSIKLNGQAELFYRPKSRMKRMAHRLGEKMLNKKLKDQKTPIPDTLYQELYDYVNHRLSHDLSDEARALLPNVITKEVSHEIIKDRRFTSDKFFFHVPITLNYQAANSPSKFNQRVNAYLKEHPETPIIGIDRGERNLIYITVIDSTGKILEQRSLNTIQQFDYQKKLDNREKERVAARQAWSVVGTIKDLKQGYLSQVIHEIVDLMIHYQAVVVLENLNFGFKSKRTGIAEKAVYQQFEKMLIDKLNCLVLKDYPAEKVGGVLNPYQLTDQFTSFAKMGTQSGFLFYVPAPYTSKIDPLTGFVDPFVWKTIKNHESRKHFLEGFDFLHYDVKTGDFILHFKMNRNLSFQRGLPGFMPAWDIVFEKNETQFDAKGTPFIAGKRIVPVIENHRFTGRYRDLYPANELIALLEEKGIVFRDGSNILPKLLENDDSHAIDTMVALIRSVLQMRNSNAATGEDYINSPVRDLNGVCFDSRFQNPEWPMDADANGAYHIALKGQLLLNHLKESKDLKLQNGISNQDWLAYIQELRN

SEQ ID NO: 117 - protein, 1307 aa, Artificial Sequence
  SYNTHETIC
MTQFEGFTNLYQVSKTLRFELIPQGKTLKHIQEQGFIEEDKARNDHYKELKPIIDRIYKTYADQCLQLVQLDWENLSAAIDSYRKEKTEETRNALIEEQATYRNAIHDYFIGRTDNLTDAINKRHAEIYKGLFKAELFNGKVLKQLGTVTTTEHENALLRSFDKFTTYFSGFYENRKNVFSAEDISTAIPHRIVQDNFPKFKENCHIFTRLITAVPSLREHFENVKKAIGIFVSTSIEEVFSFPFYNQLLTQTQIDLYNQLLGGISREAGTEKIKGLNEVLNLAIQKNDETAHIIASLPHRFIPLFKQILSDRNTLSFILEEFKSDEEVIQSFCKYKTLLRNENVLETAEALFNELNSIDLTHIFISHKKLETISSALCDHWDTLRNALYERRISELTGKITKSAKEKVQRSLKHEDINLQEIISAAGKELSEAFKQKTSEILSHAHAALDQPLPTTLKKQEEKEILKSQLDSLLGLYHLLDWFAVDESNEVDPEFSARLTGIKLEMEPSLSWYNKARNYATKKPYSVEKFKLNFQMPTLASGWDVNKEKNNGAILFVKNGLYYLGIMPKQKGRYKALSFEPTEKTSEGFDKMYYDYFPDAAKMIPKCSTQLKAVTAHFQTHTTPILLSNNFIEPLEITKEIYDLNNPEKEPKKFQTAYAKKTGDQKGYREALCKWIDFTRDFLSKYTKTTSIDLSSLRPSSQYKDLGEYYAELNPLLYHISFQRIAEKEIMDAVETGKLYLFQIYNKDFAKGHHGKPNLHTLYWTGLFSPENLAKTSIKLNGQAELFYRPKSRMKRMAHRLGEKMLNKKLKDQKTPIPDTLYQELYDYVNHRLSHDLSDEARALLPNVITKEVSHEIIKDRRFTSDKFFFHVPITLNYQAANSPSKFNQRVNAYLKEHPETPIIGIDRGERNLIYITVIDSTGKILEQRSLNTIQQFDYQKKLDNREKERVAARQAWSVVGTIKDLKQGYLSQVIHEIVDLMIHYQAVVVLENLNFGFKSKRTGIAEKAVYQQFEKMLIDKLNCLVLKDYPAEKVGGVLNPYQLTDQFTSFAKMGTQSGFLFYVPAPYTSKIDPLTGFVDPFVWKTIKNHESRKHFLEGFDFLHYDVKTGDFILHFKMNRNLSFQRGLPGFMPAWDIVFEKNETQFDAKGTPFIAGKRIVPVIENHRFTGRYRDLYPANELIALLEEKGIVFRDGSNILPKLLENDDSHAIDTMVALIRSVLQMRNSNAATGEDYINSPVRDLNGVCFDSRFQNPEWPMDADANGAYHIALKGQLLLNHLKESKDLKLQNGISNQDWLAYIQELRN

SEQ ID NO: 118 - protein, 1307 aa, Artificial Sequence
  SYNTHETIC
MTQFEGFTNLYQVSKTLRFELIPQGKTLKHIQEQGFIEEDKARNDHYKELKPIIDRIYKTYADQCLQLVQLDWENLSAAIDSYRKEKTEETRNALIEEQATYRNAIHDYFIGRTDNLTDAINKRHAEIYKGLFKAELFNGKVLKQLGTVTTTEHENALLRSFDKFTTYFSGFYENRKNVFSAEDISTAIPHRIVQDNFPKFKENCHIFTRLITAVPSLREHFENVKKAIGIFVSTSIEEVFSFPFYNQLLTQTQIDLYNQLLGGISREAGTEKIKGLNEVLNLAIQKNDETAHIIASLPHRFIPLFKQILSDRNTLSFILEEFKSDEEVIQSFCKYKTLLRNENVLETAEALFNELNSIDLTHIFISHKKLETISSALCDHWDTLRNALYERRISELTGKITKSAKEKVQRSLKHEDINLQEIISAAGKELSEAFKQKTSEILSHAHAALDQPLPTTLKKQEEKEILKSQLDSLLGLYHLLDWFAVDESNEVDPEFSARLTGIKLEMEPSLSFYAKARNYATKKPYSVEKFKLNFQMPTLASGWDVNKEKNNGAILFVKNGLYYLGIMPKQKGRYKALSFEPTEKTSEGFDKMYYDYFPDAAKMIPKCSTQLKAVTAHFQTHTTPILLSNNFIEPLEITKEIYDLNNPEKEPKKFQTAYAKKTGDQKGYREALCKWIDFTRDFLSKYTKTTSIDLSSLRPSSQYKDLGEYYAELNPLLYHISFQRIAEKEIMDAVETGKLYLFQIYNKDFAKGHHGKPNLHTLYWTGLFSPENLAKTSIKLNGQAELFYRPKSRMKRMAHRLGEKMLNKKLKDQKTPIPDTLYQELYDYVNHRLSHDLSDEARALLPNVITKEVSHEIIKDRRFTSDKFFFHVPITLNYQAANSPSKFNQRVNAYLKEHPETPIIGIDRGERNLIYITVIDSTGKILEQRSLNTIQQFDYQKKLDNREKERVAARQAWSVVGTIKDLKQGYLSQVIHEIVDLMIHYQAVVVLENLNFGFKSKRTGIAEKAVYQQFEKMLIDKLNCLVLKDYPAEKVGGVLNPYQLTDQFTSFAKMGTQSGFLFYVPAPYTSKIDPLTGFVDPFVWKTIKNHESRKHFLEGFDFLHYDVKTGDFILHFKMNRNLSFQRGLPGFMPAWDIVFEKNETQFDAKGTPFIAGKRIVPVIENHRFTGRYRDLYPANELIALLEEKGIVFRDGSNILPKLLENDDSHAIDTMVALIRSVLQMRNSNAATGEDYINSPVRDLNGVCFDSRFQNPEWPMDADANGAYHIALKGQLLLNHLKESKDLKLQNGISNQDWLAYIQELRN

SEQ ID NO: 119 - protein, 1307 aa, Artificial Sequence
  SYNTHETIC
MTQFEGFTNLYQVSKTLRFELIPQGKTLKHIQEQGFIEEDKARNDHYKELKPIIDRIYKTYADQCLQLVQLDWENLSAAIDSYRKEKTEETRNALIEEQATYRNAIHDYFIGRTDNLTDAINKRHAEIYKGLFKAELFNGKVLKQLGTVTTTEHENALLRSFDKFTTYFSGFYENRKNVFSAEDISTAIPHRIVQDNFPKFKENCHIFTRLITAVPSLREHFENVKKAIGIFVSTSIEEVFSFPFYNQLLTQTQIDLYNQLLGGISREAGTEKIKGLNEVLNLAIQKNDETAHIIASLPHRFIPLFKQILSDRNTLSFILEEFKSDEEVIQSFCKYKTLLRNENVLETAEALFNELNSIDLTHIFISHKKLETISSALCDHWDTLRNALYERRISELTGKITKSAKEKVQRSLKHEDINLQEIISAAGKELSEAFKQKTSEILSHAHAALDQPLPTTLKKQEEKEILKSQLDSLLGLYHLLDWFAVDESNEVDPEFSARLTGIKLEMEPSLSFYRKARNYATKKPYSVEKFKLNFQMPTLASGWDVNKEKNNGAILFVKNGLYYLGIMPKQKGRYKALSFEPTEKTSEGFDKMYYDYFPDAAKMIPKCSTQLKAVTAHFQTHTTPILLSNNFIEPLEITKEIYDLNNPEKEPKKFQTAYAKKTGDQKGYREALCKWIDFTRDFLSKYTKTTSIDLSSLRPSSQYKDLGEYYAELNPLLYHISFQRIAEKEIMDAVETGKLYLFQIYNKDFAKGHHGKPNLHTLYWTGLFSPENLAKTSIKLNGQAELFYRPKSRMKRMAHRLGEKMLNKKLKDQKTPIPDTLYQELYDYVNHRLSHDLSDEARALLPNVITKEVSHEIIKDRRFTSDKFFFHVPITLNYQAANSPSKFNQRVNAYLKEHPETPIIGIDRGERNLIYITVIDSTGKILEQRSLNTIQQFDYQKKLDNREKERVAARQAWSVVGTIKDLKQGYLSQVIHEIVDLMIHYQAVVVLENLNFGFKSKRTGIAEKAVYQQFEKMLIDKLNCLVLKDYPAEKVGGVLNPYQLTDQFTSFAKMGTQSGFLFYVPAPYTSKIDPLTGFVDPFVWKTIKNHESRKHFLEGFDFLHYDVKTGDFILHFKMNRNLSFQRGLPGFMPAWDIVFEKNETQFDAKGTPFIAGKRIVPVIENHRFTGRYRDLYPANELIALLEEKGIVFRDGSNILPKLLENDDSHAIDTMVALIRSVLQMRNSNAATGEDYINSPVRDLNGVCFDSRFQNPEWPMDADANGAYHIALKGQLLLNHLKESKDLKLQNGISNQDWLAYIQELRN

SEQ ID NO: 120 - protein, 1307 aa, Artificial Sequence
  SYNTHETIC
MTQFEGFTNLYQVSKTLRFELIPQGKTLKHIQEQGFIEEDKARNDHYKELKPIIDRIYKTYADQCLQLVQLDWENLSAAIDSYRKEKTEETRNALIEEQATYRNAIHDYFIGRTDNLTDAINKRHAEIYKGLFKAELFNGKVLKQLGTVTTTEHENALLRSFDKFTTYFSGFYENRKNVFSAEDISTAIPHRIVQDNFPKFKENCHIFTRLITAVPSLREHFENVKKAIGIFVSTSIEEVFSFPFYNQLLTQTQIDLYNQLLGGISREAGTEKIKGLNEVLNLAIQKNDETAHIIASLPHRFIPLFKQILSDRNTLSFILEEFKSDEEVIQSFCKYKTLLRNENVLETAEALFNELNSIDLTHIFISHKKLETISSALCDHWDTLRNALYERRISELTGKITKSAKEKVQRSLKHEDINLQEIISAAGKELSEAFKQKTSEILSHAHAALDQPLPTTLKKQEEKEILKSQLDSLLGLYHLLDWFAVDESNEVDPEFSARLTGIKLEMEPSLSFYIKARNYATKKPYSVEKFKLNFQMPTLASGWDVNKEKNNGAILFVKNGLYYLGIMPKQKGRYKALSFEPTEKTSEGFDKMYYDYFPDAAKMIPKCSTQLKAVTAHFQTHTTPILLSNNFIEPLEITKEIYDLNNPEKEPKKFQTAYAKKTGDQKGYREALCKWIDFTRDFLSKYTKTTSIDLSSLRPSSQYKDLGEYYAELNPLLYHISFQRIAEKEIMDAVETGKLYLFQIYNKDFAKGHHGKPNLHTLYWTGLFSPENLAKTSIKLNGQAELFYRPKSRMKRMAHRLGEKMLNKKLKDQKTPIPDTLYQELYDYVNHRLSHDLSDEARALLPNVITKEVSHEIIKDRRFTSDKFFFHVPITLNYQAANSPSKFNQRVNAYLKEHPETPIIGIDRGERNLIYITVIDSTGKILEQRSLNTIQQFDYQKKLDNREKERVAARQAWSVVGTIKDLKQGYLSQVIHEIVDLMIHYQAVVVLENLNFGFKSKRTGIAEKAVYQQFEKMLIDKLNCLVLKDYPAEKVGGVLNPYQLTDQFTSFAKMGTQSGFLFYVPAPYTSKIDPLTGFVDPFVWKTIKNHESRKHFLEGFDFLHYDVKTGDFILHFKMNRNLSFQRGLPGFMPAWDIVFEKNETQFDAKGTPFIAGKRIVPVIENHRFTGRYRDLYPANELIALLEEKGIVFRDGSNILPKLLENDDSHAIDTMVALIRSVLQMRNSNAATGEDYINSPVRDLNGVCFDSRFQNPEWPMDADANGAYHIALKGQLLLNHLKESKDLKLQNGISNQDWLAYIQELRN

SEQ ID NO: 121 - protein, 1307 aa, Artificial Sequence
  SYNTHETIC
MTQFEGFTNLYQVSKTLRFELIPQGKTLKHIQEQGFIEEDKARNDHYKELKPIIDRIYKTYADQCLQLVQLDWENLSAAIDSYRKEKTEETRNALIEEQATYRNAIHDYFIGRTDNLTDAINKRHAEIYKGLFKAELFNGKVLKQLGTVTTTEHENALLRSFDKFTTYFSGFYENRKNVFSAEDISTAIPHRIVQDNFPKFKENCHIFTRLITAVPSLREHFENVKKAIGIFVSTSIEEVFSFPFYNQLLTQTQIDLYNQLLGGISREAGTEKIKGLNEVLNLAIQKNDETAHIIASLPHRFIPLFKQILSDRNTLSFILEEFKSDEEVIQSFCKYKTLLRNENVLETAEALFNELNSIDLTHIFISHKKLETISSALCDHWDTLRNALYERRISELTGKITKSAKEKVQRSLKHEDINLQEIISAAGKELSEAFKQKTSEILSHAHAALDQPLPTTLKKQEEKEILKSQLDSLLGLYHLLDWFAVDESNEVDPEFSARLTGIKLEMEPSLSFYLKARNYATKKPYSVEKFKLNFQMPTLASGWDVNKEKNNGAILFVKNGLYYLGIMPKQKGRYKALSFEPTEKTSEGFDKMYYDYFPDAAKMIPKCSTQLKAVTAHFQTHTTPILLSNNFIEPLEITKEIYDLNNPEKEPKKFQTAYAKKTGDQKGYREALCKWIDFTRDFLSKYTKTTSIDLSSLRPSSQYKDLGEYYAELNPLLYHISFQRIAEKEIMDAVETGKLYLFQIYNKDFAKGHHGKPNLHTLYWTGLFSPENLAKTSIKLNGQAELFYRPKSRMKRMAHRLGEKMLNKKLKDQKTPIPDTLYQELYDYVNHRLSHDLSDEARALLPNVITKEVSHEIIKDRRFTSDKFFFHVPITLNYQAANSPSKFNQRVNAYLKEHPETPIIGIDRGERNLIYITVIDSTGKILEQRSLNTIQQFDYQKKLDNREKERVAARQAWSVVGTIKDLKQGYLSQVIHEIVDLMIHYQAVVVLENLNFGFKSKRTGIAEKAVYQQFEKMLIDKLNCLVLKDYPAEKVGGVLNPYQLTDQFTSFAKMGTQSGFLFYVPAPYTSKIDPLTGFVDPFVWKTIKNHESRKHFLEGFDFLHYDVKTGDFILHFKMNRNLSFQRGLPGFMPAWDIVFEKNETQFDAKGTPFIAGKRIVPVIENHRFTGRYRDLYPANELIALLEEKGIVFRDGSNILPKLLENDDSHAIDTMVALIRSVLQMRNSNAATGEDYINSPVRDLNGVCFDSRFQNPEWPMDADANGAYHIALKGQLLLNHLKESKDLKLQNGISNQDWLAYIQELRN

SEQ ID NO: 122 - protein, 1307 aa, Artificial Sequence
  SYNTHETIC
MTQFEGFTNLYQVSKTLRFELIPQGKTLKHIQEQGFIEEDKARNDHYKELKPIIDRIYKTYADQCLQLVQLDWENLSAAIDSYRKEKTEETRNALIEEQATYRNAIHDYFIGRTDNLTDAINKRHAEIYKGLFKAELFNGKVLKQLGTVTTTEHENALLRSFDKFTTYFSGFYENRKNVFSAEDISTAIPHRIVQDNFPKFKENCHIFTRLITAVPSLREHFENVKKAIGIFVSTSIEEVFSFPFYNQLLTQTQIDLYNQLLGGISREAGTEKIKGLNEVLNLAIQKNDETAHIIASLPHRFIPLFKQILSDRNTLSFILEEFKSDEEVIQSFCKYKTLLRNENVLETAEALFNELNSIDLTHIFISHKKLETISSALCDHWDTLRNALYERRISELTGKITKSAKEKVQRSLKHEDINLQEIISAAGKELSEAFKQKTSEILSHAHAALDQPLPTTLKKQEEKEILKSQLDSLLGLYHLLDWFAVDESNEVDPEFSARLTGIKLEMEPSLSFYTKARNYATKKPYSVEKFKLNFQMPTLASGWDVNKEKNNGAILFVKNGLYYLGIMPKQKGRYKALSFEPTEKTSEGFDKMYYDYFPDAAKMIPKCSTQLKAVTAHFQTHTTPILLSNNFIEPLEITKEIYDLNNPEKEPKKFQTAYAKKTGDQKGYREALCKWIDFTRDFLSKYTKTTSIDLSSLRPSSQYKDLGEYYAELNPLLYHISFQRIAEKEIMDAVETGKLYLFQIYNKDFAKGHHGKPNLHTLYWTGLFSPENLAKTSIKLNGQAELFYRPKSRMKRMAHRLGEKMLNKKLKDQKTPIPDTLYQELYDYVNHRLSHDLSDEARALLPNVITKEVSHEIIKDRRFTSDKFFFHVPITLNYQAANSPSKFNQRVNAYLKEHPETPIIGIDRGERNLIYITVIDSTGKILEQRSLNTIQQFDYQKKLDNREKERVAARQAWSVVGTIKDLKQGYLSQVIHEIVDLMIHYQAVVVLENLNFGFKSKRTGIAEKAVYQQFEKMLIDKLNCLVLKDYPAEKVGGVLNPYQLTDQFTSFAKMGTQSGFLFYVPAPYTSKIDPLTGFVDPFVWKTIKNHESRKHFLEGFDFLHYDVKTGDFILHFKMNRNLSFQRGLPGFMPAWDIVFEKNETQFDAKGTPFIAGKRIVPVIENHRFTGRYRDLYPANELIALLEEKGIVFRDGSNILPKLLENDDSHAIDTMVALIRSVLQMRNSNAATGEDYINSPVRDLNGVCFDSRFQNPEWPMDADANGAYHIALKGQLLLNHLKESKDLKLQNGISNQDWLAYIQELRN

SEQ ID NO: 123 - protein, 1307 aa, Artificial Sequence
  SYNTHETIC
MTQFEGFTNLYQVSKTLRFELIPQGKTLKHIQEQGFIEEDKARNDHYKELKPIIDRIYKTYADQCLQLVQLDWENLSAAIDSYRKEKTEETRNALIEEQATYRNAIHDYFIGRTDNLTDAINKRHAEIYKGLFKAELFNGKVLKQLGTVTTTEHENALLRSFDKFTTYFSGFYENRKNVFSAEDISTAIPHRIVQDNFPKFKENCHIFTRLITAVPSLREHFENVKKAIGIFVSTSIEEVFSFPFYNQLLTQTQIDLYNQLLGGISREAGTEKIKGLNEVLNLAIQKNDETAHIIASLPHRFIPLFKQILSDRNTLSFILEEFKSDEEVIQSFCKYKTLLRNENVLETAEALFNELNSIDLTHIFISHKKLETISSALCDHWDTLRNALYERRISELTGKITKSAKEKVQRSLKHEDINLQEIISAAGKELSEAFKQKTSEILSHAHAALDQPLPTTLKKQEEKEILKSQLDSLLGLYHLLDWFAVDESNEVDPEFSARLTGIKLEMEPSLSFYVKARNYATKKPYSVEKFKLNFQMPTLASGWDVNKEKNNGAILFVKNGLYYLGIMPKQKGRYKALSFEPTEKTSEGFDKMYYDYFPDAAKMIPKCSTQLKAVTAHFQTHTTPILLSNNFIEPLEITKEIYDLNNPEKEPKKFQTAYAKKTGDQKGYREALCKWIDFTRDFLSKYTKTTSIDLSSLRPSSQYKDLGEYYAELNPLLYHISFQRIAEKEIMDAVETGKLYLFQIYNKDFAKGHHGKPNLHTLYWTGLFSPENLAKTSIKLNGQAELFYRPKSRMKRMAHRLGEKMLNKKLKDQKTPIPDTLYQELYDYVNHRLSHDLSDEARALLPNVITKEVSHEIIKDRRFTSDKFFFHVPITLNYQAANSPSKFNQRVNAYLKEHPETPIIGIDRGERNLIYITVIDSTGKILEQRSLNTIQQFDYQKKLDNREKERVAARQAWSVVGTIKDLKQGYLSQVIHEIVDLMIHYQAVVVLENLNFGFKSKRTGIAEKAVYQQFEKMLIDKLNCLVLKDYPAEKVGGVLNPYQLTDQFTSFAKMGTQSGFLFYVPAPYTSKIDPLTGFVDPFVWKTIKNHESRKHFLEGFDFLHYDVKTGDFILHFKMNRNLSFQRGLPGFMPAWDIVFEKNETQFDAKGTPFIAGKRIVPVIENHRFTGRYRDLYPANELIALLEEKGIVFRDGSNILPKLLENDDSHAIDTMVALIRSVLQMRNSNAATGEDYINSPVRDLNGVCFDSRFQNPEWPMDADANGAYHIALKGQLLLNHLKESKDLKLQNGISNQDWLAYIQELRN

SEQ ID NO: 124 - protein, 1307 aa, Artificial Sequence
  SYNTHETIC
MTQFEGFTNLYQVSKTLRFELIPQGKTLKHIQEQGFIEEDKARNDHYKELKPIIDRIYKTYADQCLQLVQLDWENLSAAIDSYRKEKTEETRNALIEEQATYRNAIHDYFIGRTDNLTDAINKRHAEIYKGLFKAELFNGKVLKQLGTVTTTEHENALLRSFDKFTTYFSGFYENRKNVFSAEDISTAIPHRIVQDNFPKFKENCHIFTRLITAVPSLREHFENVKKAIGIFVSTSIEEVFSFPFYNQLLTQTQIDLYNQLLGGISREAGTEKIKGLNEVLNLAIQKNDETAHIIASLPHRFIPLFKQILSDRNTLSFILEEFKSDEEVIQSFCKYKTLLRNENVLETAEALFNELNSIDLTHIFISHKKLETISSALCDHWDTLRNALYERRISELTGKITKSAKEKVQRSLKHEDINLQEIISAAGKELSEAFKQKTSEILSHAHAALDQPLPTTLKKQEEKEILKSQLDSLLGLYHLLDWFAVDESNEVDPEFSARLTGIKLEMEPSLSFYNRARNYATKKPYSVEKFKLNFQMPTLASGWDVNKEKNNGAILFVKNGLYYLGIMPKQKGRYKALSFEPTEKTSEGFDKMYYDYFPDAAKMIPKCSTQLKAVTAHFQTHTTPILLSNNFIEPLEITKEIYDLNNPEKEPKKFQTAYAKKTGDQKGYREALCKWIDFTRDFLSKYTKTTSIDLSSLRPSSQYKDLGEYYAELNPLLYHISFQRIAEKEIMDAVETGKLYLFQIYNKDFAKGHHGKPNLHTLYWTGLFSPENLAKTSIKLNGQAELFYRPKSRMKRMAHRLGEKMLNKKLKDQKTPIPDTLYQELYDYVNHRLSHDLSDEARALLPNVITKEVSHEIIKDRRFTSDKFFFHVPITLNYQAANSPSKFNQRVNAYLKEHPETPIIGIDRGERNLIYITVIDSTGKILEQRSLNTIQQFDYQKKLDNREKERVAARQAWSVVGTIKDLKQGYLSQVIHEIVDLMIHYQAVVVLENLNFGFKSKRTGIAEKAVYQQFEKMLIDKLNCLVLKDYPAEKVGGVLNPYQLTDQFTSFAKMGTQSGFLFYVPAPYTSKIDPLTGFVDPFVWKTIKNHESRKHFLEGFDFLHYDVKTGDFILHFKMNRNLSFQRGLPGFMPAWDIVFEKNETQFDAKGTPFIAGKRIVPVIENHRFTGRYRDLYPANELIALLEEKGIVFRDGSNILPKLLENDDSHAIDTMVALIRSVLQMRNSNAATGEDYINSPVRDLNGVCFDSRFQNPEWPMDADANGAYHIALKGQLLLNHLKESKDLKLQNGISNQDWLAYIQELRN

SEQ ID NO: 125 - protein, 1307 aa, Artificial Sequence
  SYNTHETIC
MTQFEGFTNLYQVSKTLRFELIPQGKTLKHIQEQGFIEEDKARNDHYKELKPIIDRIYKTYADQCLQLVQLDWENLSAAIDSYRKEKTEETRNALIEEQATYRNAIHDYFIGRTDNLTDAINKRHAEIYKGLFKAELFNGKVLKQLGTVTTTEHENALLRSFDKFTTYFSGFYENRKNVFSAEDISTAIPHRIVQDNFPKFKENCHIFTRLITAVPSLREHFENVKKAIGIFVSTSIEEVFSFPFYNQLLTQTQIDLYNQLLGGISREAGTEKIKGLNEVLNLAIQKNDETAHIIASLPHRFIPLFKQILSDRNTLSFILEEFKSDEEVIQSFCKYKTLLRNENVLETAEALFNELNSIDLTHIFISHKKLETISSALCDHWDTLRNALYERRISELTGKITKSAKEKVQRSLKHEDINLQEIISAAGKELSEAFKQKTSEILSHAHAALDQPLPTTLKKQEEKEILKSQLDSLLGLYHLLDWFAVDESNEVDPEFSARLTGIKLEMEPSLSFYNKAKNYATKKPYSVEKFKLNFQMPTLASGWDVNKEKNNGAILFVKNGLYYLGIMPKQKGRYKALSFEPTEKTSEGFDKMYYDYFPDAAKMIPKCSTQLKAVTAHFQTHTTPILLSNNFIEPLEITKEIYDLNNPEKEPKKFQTAYAKKTGDQKGYREALCKWIDFTRDFLSKYTKTTSIDLSSLRPSSQYKDLGEYYAELNPLLYHISFQRIAEKEIMDAVETGKLYLFQIYNKDFAKGHHGKPNLHTLYWTGLFSPENLAKTSIKLNGQAELFYRPKSRMKRMAHRLGEKMLNKKLKDQKTPIPDTLYQELYDYVNHRLSHDLSDEARALLPNVITKEVSHEIIKDRRFTSDKFFFHVPITLNYQAANSPSKFNQRVNAYLKEHPETPIIGIDRGERNLIYITVIDSTGKILEQRSLNTIQQFDYQKKLDNREKERVAARQAWSVVGTIKDLKQGYLSQVIHEIVDLMIHYQAVVVLENLNFGFKSKRTGIAEKAVYQQFEKMLIDKLNCLVLKDYPAEKVGGVLNPYQLTDQFTSFAKMGTQSGFLFYVPAPYTSKIDPLTGFVDPFVWKTIKNHESRKHFLEGFDFLHYDVKTGDFILHFKMNRNLSFQRGLPGFMPAWDIVFEKNETQFDAKGTPFIAGKRIVPVIENHRFTGRYRDLYPANELIALLEEKGIVFRDGSNILPKLLENDDSHAIDTMVALIRSVLQMRNSNAATGEDYINSPVRDLNGVCFDSRFQNPEWPMDADANGAYHIALKGQLLLNHLKESKDLKLQNGISNQDWLAYIQELRN

SEQ ID NO: 126 - protein, 1307 aa, Artificial Sequence
  SYNTHETIC
MTQFEGFTNLYQVSKTLRFELIPQGKTLKHIQEQGFIEEDKARNDHYKELKPIIDRIYKTYADQCLQLVQLDWENLSAAIDSYRKEKTEETRNALIEEQATYRNAIHDYFIGRTDNLTDAINKRHAEIYKGLFKAELFNGKVLKQLGTVTTTEHENALLRSFDKFTTYFSGFYENRKNVFSAEDISTAIPHRIVQDNFPKFKENCHIFTRLITAVPSLREHFENVKKAIGIFVSTSIEEVFSFPFYNQLLTQTQIDLYNQLLGGISREAGTEKIKGLNEVLNLAIQKNDETAHIIASLPHRFIPLFKQILSDRNTLSFILEEFKSDEEVIQSFCKYKTLLRNENVLETAEALFNELNSIDLTHIFISHKKLETISSALCDHWDTLRNALYERRISELTGKITKSAKEKVQRSLKHEDINLQEIISAAGKELSEAFKQKTSEILSHAHAALDQPLPTTLKKQEEKEILKSQLDSLLGLYHLLDWFAVDESNEVDPEFSARLTGIKLEMEPSLSFYNKARNYALKKPYSVEKFKLNFQMPTLASGWDVNKEKNNGAILFVKNGLYYLGIMPKQKGRYKALSFEPTEKTSEGFDKMYYDYFPDAAKMIPKCSTQLKAVTAHFQTHTTPILLSNNFIEPLEITKEIYDLNNPEKEPKKFQTAYAKKTGDQKGYREALCKWIDFTRDFLSKYTKTTSIDLSSLRPSSQYKDLGEYYAELNPLLYHISFQRIAEKEIMDAVETGKLYLFQIYNKDFAKGHHGKPNLHTLYWTGLFSPENLAKTSIKLNGQAELFYRPKSRMKRMAHRLGEKMLNKKLKDQKTPIPDTLYQELYDYVNHRLSHDLSDEARALLPNVITKEVSHEIIKDRRFTSDKFFFHVPITLNYQAANSPSKFNQRVNAYLKEHPETPIIGIDRGERNLIYITVIDSTGKILEQRSLNTIQQFDYQKKLDNREKERVAARQAWSVVGTIKDLKQGYLSQVIHEIVDLMIHYQAVVVLENLNFGFKSKRTGIAEKAVYQQFEKMLIDKLNCLVLKDYPAEKVGGVLNPYQLTDQFTSFAKMGTQSGFLFYVPAPYTSKIDPLTGFVDPFVWKTIKNHESRKHFLEGFDFLHYDVKTGDFILHFKMNRNLSFQRGLPGFMPAWDIVFEKNETQFDAKGTPFIAGKRIVPVIENHRFTGRYRDLYPANELIALLEEKGIVFRDGSNILPKLLENDDSHAIDTMVALIRSVLQMRNSNAATGEDYINSPVRDLNGVCFDSRFQNPEWPMDADANGAYHIALKGQLLLNHLKESKDLKLQNGISNQDWLAYIQELRN

SEQ ID NO: 127 - protein, 1307 aa, Artificial Sequence
  SYNTHETIC
MTQFEGFTNLYQVSKTLRFELIPQGKTLKHIQEQGFIEEDKARNDHYKELKPIIDRIYKTYADQCLQLVQLDWENLSAAIDSYRKEKTEETRNALIEEQATYRNAIHDYFIGRTDNLTDAINKRHAEIYKGLFKAELFNGKVLKQLGTVTTTEHENALLRSFDKFTTYFSGFYENRKNVFSAEDISTAIPHRIVQDNFPKFKENCHIFTRLITAVPSLREHFENVKKAIGIFVSTSIEEVFSFPFYNQLLTQTQIDLYNQLLGGISREAGTEKIKGLNEVLNLAIQKNDETAHIIASLPHRFIPLFKQILSDRNTLSFILEEFKSDEEVIQSFCKYKTLLRNENVLETAEALFNELNSIDLTHIFISHKKLETISSALCDHWDTLRNALYERRISELTGKITKSAKEKVQRSLKHEDINLQEIISAAGKELSEAFKQKTSEILSHAHAALDQPLPTTLKKQEEKEILKSQLDSLLGLYHLLDWFAVDESNEVDPEFSARLTGIKLEMEPSLSFYNKARNYAMKKPYSVEKFKLNFQMPTLASGWDVNKEKNNGAILFVKNGLYYLGIMPKQKGRYKALSFEPTEKTSEGFDKMYYDYFPDAAKMIPKCSTQLKAVTAHFQTHTTPILLSNNFIEPLEITKEIYDLNNPEKEPKKFQTAYAKKTGDQKGYREALCKWIDFTRDFLSKYTKTTSIDLSSLRPSSQYKDLGEYYAELNPLLYHISFQRIAEKEIMDAVETGKLYLFQIYNKDFAKGHHGKPNLHTLYWTGLFSPENLAKTSIKLNGQAELFYRPKSRMKRMAHRLGEKMLNKKLKDQKTPIPDTLYQELYDYVNHRLSHDLSDEARALLPNVITKEVSHEIIKDRRFTSDKFFFHVPITLNYQAANSPSKFNQRVNAYLKEHPETPIIGIDRGERNLIYITVIDSTGKILEQRSLNTIQQFDYQKKLDNREKERVAARQAWSVVGTIKDLKQGYLSQVIHEIVDLMIHYQAVVVLENLNFGFKSKRTGIAEKAVYQQFEKMLIDKLNCLVLKDYPAEKVGGVLNPYQLTDQFTSFAKMGTQSGFLFYVPAPYTSKIDPLTGFVDPFVWKTIKNHESRKHFLEGFDFLHYDVKTGDFILHFKMNRNLSFQRGLPGFMPAWDIVFEKNETQFDAKGTPFIAGKRIVPVIENHRFTGRYRDLYPANELIALLEEKGIVFRDGSNILPKLLENDDSHAIDTMVALIRSVLQMRNSNAATGEDYINSPVRDLNGVCFDSRFQNPEWPMDADANGAYHIALKGQLLLNHLKESKDLKLQNGISNQDWLAYIQELRN

SEQ ID NO: 128 - protein, 1307 aa, Artificial Sequence
  SYNTHETIC
MTQFEGFTNLYQVSKTLRFELIPQGKTLKHIQEQGFIEEDKARNDHYKELKPIIDRIYKTYADQCLQLVQLDWENLSAAIDSYRKEKTEETRNALIEEQATYRNAIHDYFIGRTDNLTDAINKRHAEIYKGLFKAELFNGKVLKQLGTVTTTEHENALLRSFDKFTTYFSGFYENRKNVFSAEDISTAIPHRIVQDNFPKFKENCHIFTRLITAVPSLREHFENVKKAIGIFVSTSIEEVFSFPFYNQLLTQTQIDLYNQLLGGISREAGTEKIKGLNEVLNLAIQKNDETAHIIASLPHRFIPLFKQILSDRNTLSFILEEFKSDEEVIQSFCKYKTLLRNENVLETAEALFNELNSIDLTHIFISHKKLETISSALCDHWDTLRNALYERRISELTGKITKSAKEKVQRSLKHEDINLQEIISAAGKELSEAFKQKTSEILSHAHAALDQPLPTTLKKQEEKEILKSQLDSLLGLYHLLDWFAVDESNEVDPEFSARLTGIKLEMEPSLSFYNKARNYAVKKPYSVEKFKLNFQMPTLASGWDVNKEKNNGAILFVKNGLYYLGIMPKQKGRYKALSFEPTEKTSEGFDKMYYDYFPDAAKMIPKCSTQLKAVTAHFQTHTTPILLSNNFIEPLEITKEIYDLNNPEKEPKKFQTAYAKKTGDQKGYREALCKWIDFTRDFLSKYTKTTSIDLSSLRPSSQYKDLGEYYAELNPLLYHISFQRIAEKEIMDAVETGKLYLFQIYNKDFAKGHHGKPNLHTLYWTGLFSPENLAKTSIKLNGQAELFYRPKSRMKRMAHRLGEKMLNKKLKDQKTPIPDTLYQELYDYVNHRLSHDLSDEARALLPNVITKEVSHEIIKDRRFTSDKFFFHVPITLNYQAANSPSKFNQRVNAYLKEHPETPIIGIDRGERNLIYITVIDSTGKILEQRSLNTIQQFDYQKKLDNREKERVAARQAWSVVGTIKDLKQGYLSQVIHEIVDLMIHYQAVVVLENLNFGFKSKRTGIAEKAVYQQFEKMLIDKLNCLVLKDYPAEKVGGVLNPYQLTDQFTSFAKMGTQSGFLFYVPAPYTSKIDPLTGFVDPFVWKTIKNHESRKHFLEGFDFLHYDVKTGDFILHFKMNRNLSFQRGLPGFMPAWDIVFEKNETQFDAKGTPFIAGKRIVPVIENHRFTGRYRDLYPANELIALLEEKGIVFRDGSNILPKLLENDDSHAIDTMVALIRSVLQMRNSNAATGEDYINSPVRDLNGVCFDSRFQNPEWPMDADANGAYHIALKGQLLLNHLKESKDLKLQNGISNQDWLAYIQELRN

SEQ ID NO: 129 - protein, 1307 aa, Artificial Sequence
  SYNTHETIC
MTQFEGFTNLYQVSKTLRFELIPQGKTLKHIQEQGFIEEDKARNDHYKELKPIIDRIYKTYADQCLQLVQLDWENLSAAIDSYRKEKTEETRNALIEEQATYRNAIHDYFIGRTDNLTDAINKRHAEIYKGLFKAELFNGKVLKQLGTVTTTEHENALLRSFDKFTTYFSGFYENRKNVFSAEDISTAIPHRIVQDNFPKFKENCHIFTRLITAVPSLREHFENVKKAIGIFVSTSIEEVFSFPFYNQLLTQTQIDLYNQLLGGISREAGTEKIKGLNEVLNLAIQKNDETAHIIASLPHRFIPLFKQILSDRNTLSFILEEFKSDEEVIQSFCKYKTLLRNENVLETAEALFNELNSIDLTHIFISHKKLETISSALCDHWDTLRNALYERRISELTGKITKSAKEKVQRSLKHEDINLQEIISAAGKELSEAFKQKTSEILSHAHAALDQPLPTTLKKQEEKEILKSQLDSLLGLYHLLDWFAVDESNEVDPEFSARLTGIKLEMEPSLSFYNKARNYATRKPYSVEKFKLNFQMPTLASGWDVNKEKNNGAILFVKNGLYYLGIMPKQKGRYKALSFEPTEKTSEGFDKMYYDYFPDAAKMIPKCSTQLKAVTAHFQTHTTPILLSNNFIEPLEITKEIYDLNNPEKEPKKFQTAYAKKTGDQKGYREALCKWIDFTRDFLSKYTKTTSIDLSSLRPSSQYKDLGEYYAELNPLLYHISFQRIAEKEIMDAVETGKLYLFQIYNKDFAKGHHGKPNLHTLYWTGLFSPENLAKTSIKLNGQAELFYRPKSRMKRMAHRLGEKMLNKKLKDQKTPIPDTLYQELYDYVNHRLSHDLSDEARALLPNVITKEVSHEIIKDRRFTSDKFFFHVPITLNYQAANSPSKFNQRVNAYLKEHPETPIIGIDRGERNLIYITVIDSTGKILEQRSLNTIQQFDYQKKLDNREKERVAARQAWSVVGTIKDLKQGYLSQVIHEIVDLMIHYQAVVVLENLNFGFKSKRTGIAEKAVYQQFEKMLIDKLNCLVLKDYPAEKVGGVLNPYQLTDQFTSFAKMGTQSGFLFYVPAPYTSKIDPLTGFVDPFVWKTIKNHESRKHFLEGFDFLHYDVKTGDFILHFKMNRNLSFQRGLPGFMPAWDIVFEKNETQFDAKGTPFIAGKRIVPVIENHRFTGRYRDLYPANELIALLEEKGIVFRDGSNILPKLLENDDSHAIDTMVALIRSVLQMRNSNAATGEDYINSPVRDLNGVCFDSRFQNPEWPMDADANGAYHIALKGQLLLNHLKESKDLKLQNGISNQDWLAYIQELRN

SEQ ID NO: 130 - protein, 1307 aa, Artificial Sequence
  SYNTHETIC
MTQFEGFTNLYQVSKTLRFELIPQGKTLKHIQEQGFIEEDKARNDHYKELKPIIDRIYKTYADQCLQLVQLDWENLSAAIDSYRKEKTEETRNALIEEQATYRNAIHDYFIGRTDNLTDAINKRHAEIYKGLFKAELFNGKVLKQLGTVTTTEHENALLRSFDKFTTYFSGFYENRKNVFSAEDISTAIPHRIVQDNFPKFKENCHIFTRLITAVPSLREHFENVKKAIGIFVSTSIEEVFSFPFYNQLLTQTQIDLYNQLLGGISREAGTEKIKGLNEVLNLAIQKNDETAHIIASLPHRFIPLFKQILSDRNTLSFILEEFKSDEEVIQSFCKYKTLLRNENVLETAEALFNELNSIDLTHIFISHKKLETISSALCDHWDTLRNALYERRISELTGKITKSAKEKVQRSLKHEDINLQEIISAAGKELSEAFKQKTSEILSHAHAALDQPLPTTLKKQEEKEILKSQLDSLLGLYHLLDWFAVDESNEVDPEFSARLTGIKLEMEPSLSFYNKARNYATKKPYDVEKFKLNFQMPTLASGWDVNKEKNNGAILFVKNGLYYLGIMPKQKGRYKALSFEPTEKTSEGFDKMYYDYFPDAAKMIPKCSTQLKAVTAHFQTHTTPILLSNNFIEPLEITKEIYDLNNPEKEPKKFQTAYAKKTGDQKGYREALCKWIDFTRDFLSKYTKTTSIDLSSLRPSSQYKDLGEYYAELNPLLYHISFQRIAEKEIMDAVETGKLYLFQIYNKDFAKGHHGKPNLHTLYWTGLFSPENLAKTSIKLNGQAELFYRPKSRMKRMAHRLGEKMLNKKLKDQKTPIPDTLYQELYDYVNHRLSHDLSDEARALLPNVITKEVSHEIIKDRRFTSDKFFFHVPITLNYQAANSPSKFNQRVNAYLKEHPETPIIGIDRGERNLIYITVIDSTGKILEQRSLNTIQQFDYQKKLDNREKERVAARQAWSVVGTIKDLKQGYLSQVIHEIVDLMIHYQAVVVLENLNFGFKSKRTGIAEKAVYQQFEKMLIDKLNCLVLKDYPAEKVGGVLNPYQLTDQFTSFAKMGTQSGFLFYVPAPYTSKIDPLTGFVDPFVWKTIKNHESRKHFLEGFDFLHYDVKTGDFILHFKMNRNLSFQRGLPGFMPAWDIVFEKNETQFDAKGTPFIAGKRIVPVIENHRFTGRYRDLYPANELIALLEEKGIVFRDGSNILPKLLENDDSHAIDTMVALIRSVLQMRNSNAATGEDYINSPVRDLNGVCFDSRFQNPEWPMDADANGAYHIALKGQLLLNHLKESKDLKLQNGISNQDWLAYIQELRN

SEQ ID NO: 131 - protein, 1307 aa, Artificial Sequence
  SYNTHETIC
MTQFEGFTNLYQVSKTLRFELIPQGKTLKHIQEQGFIEEDKARNDHYKELKPIIDRIYKTYADQCLQLVQLDWENLSAAIDSYRKEKTEETRNALIEEQATYRNAIHDYFIGRTDNLTDAINKRHAEIYKGLFKAELFNGKVLKQLGTVTTTEHENALLRSFDKFTTYFSGFYENRKNVFSAEDISTAIPHRIVQDNFPKFKENCHIFTRLITAVPSLREHFENVKKAIGIFVSTSIEEVFSFPFYNQLLTQTQIDLYNQLLGGISREAGTEKIKGLNEVLNLAIQKNDETAHIIASLPHRFIPLFKQILSDRNTLSFILEEFKSDEEVIQSFCKYKTLLRNENVLETAEALFNELNSIDLTHIFISHKKLETISSALCDHWDTLRNALYERRISELTGKITKSAKEKVQRSLKHEDINLQEIISAAGKELSEAFKQKTSEILSHAHAALDQPLPTTLKKQEEKEILKSQLDSLLGLYHLLDWFAVDESNEVDPEFSARLTGIKLEMEPSLSFYNKARNYATKKPYSDEKFKLNFQMPTLASGWDVNKEKNNGAILFVKNGLYYLGIMPKQKGRYKALSFEPTEKTSEGFDKMYYDYFPDAAKMIPKCSTQLKAVTAHFQTHTTPILLSNNFIEPLEITKEIYDLNNPEKEPKKFQTAYAKKTGDQKGYREALCKWIDFTRDFLSKYTKTTSIDLSSLRPSSQYKDLGEYYAELNPLLYHISFQRIAEKEIMDAVETGKLYLFQIYNKDFAKGHHGKPNLHTLYWTGLFSPENLAKTSIKLNGQAELFYRPKSRMKRMAHRLGEKMLNKKLKDQKTPIPDTLYQELYDYVNHRLSHDLSDEARALLPNVITKEVSHEIIKDRRFTSDKFFFHVPITLNYQAANSPSKFNQRVNAYLKEHPETPIIGIDRGERNLIYITVIDSTGKILEQRSLNTIQQFDYQKKLDNREKERVAARQAWSVVGTIKDLKQGYLSQVIHEIVDLMIHYQAVVVLENLNFGFKSKRTGIAEKAVYQQFEKMLIDKLNCLVLKDYPAEKVGGVLNPYQLTDQFTSFAKMGTQSGFLFYVPAPYTSKIDPLTGFVDPFVWKTIKNHESRKHFLEGFDFLHYDVKTGDFILHFKMNRNLSFQRGLPGFMPAWDIVFEKNETQFDAKGTPFIAGKRIVPVIENHRFTGRYRDLYPANELIALLEEKGIVFRDGSNILPKLLENDDSHAIDTMVALIRSVLQMRNSNAATGEDYINSPVRDLNGVCFDSRFQNPEWPMDADANGAYHIALKGQLLLNHLKESKDLKLQNGISNQDWLAYIQELRN

SEQ ID NO: 132 - protein, 1307 aa, Artificial Sequence
  SYNTHETIC
MTQFEGFTNLYQVSKTLRFELIPQGKTLKHIQEQGFIEEDKARNDHYKELKPIIDRIYKTYADQCLQLVQLDWENLSAAIDSYRKEKTEETRNALIEEQATYRNAIHDYFIGRTDNLTDAINKRHAEIYKGLFKAELFNGKVLKQLGTVTTTEHENALLRSFDKFTTYFSGFYENRKNVFSAEDISTAIPHRIVQDNFPKFKENCHIFTRLITAVPSLREHFENVKKAIGIFVSTSIEEVFSFPFYNQLLTQTQIDLYNQLLGGISREAGTEKIKGLNEVLNLAIQKNDETAHIIASLPHRFIPLFKQILSDRNTLSFILEEFKSDEEVIQSFCKYKTLLRNENVLETAEALFNELNSIDLTHIFISHKKLETISSALCDHWDTLRNALYERRISELTGKITKSAKEKVQRSLKHEDINLQEIISAAGKELSEAFKQKTSEILSHAHAALDQPLPTTLKKQEEKEILKSQLDSLLGLYHLLDWFAVDESNEVDPEFSARLTGIKLEMEPSLSFYNKARNYATKKPYSLEKFKLNFQMPTLASGWDVNKEKNNGAILFVKNGLYYLGIMPKQKGRYKALSFEPTEKTSEGFDKMYYDYFPDAAKMIPKCSTQLKAVTAHFQTHTTPILLSNNFIEPLEITKEIYDLNNPEKEPKKFQTAYAKKTGDQKGYREALCKWIDFTRDFLSKYTKTTSIDLSSLRPSSQYKDLGEYYAELNPLLYHISFQRIAEKEIMDAVETGKLYLFQIYNKDFAKGHHGKPNLHTLYWTGLFSPENLAKTSIKLNGQAELFYRPKSRMKRMAHRLGEKMLNKKLKDQKTPIPDTLYQELYDYVNHRLSHDLSDEARALLPNVITKEVSHEIIKDRRFTSDKFFFHVPITLNYQAANSPSKFNQRVNAYLKEHPETPIIGIDRGERNLIYITVIDSTGKILEQRSLNTIQQFDYQKKLDNREKERVAARQAWSVVGTIKDLKQGYLSQVIHEIVDLMIHYQAVVVLENLNFGFKSKRTGIAEKAVYQQFEKMLIDKLNCLVLKDYPAEKVGGVLNPYQLTDQFTSFAKMGTQSGFLFYVPAPYTSKIDPLTGFVDPFVWKTIKNHESRKHFLEGFDFLHYDVKTGDFILHFKMNRNLSFQRGLPGFMPAWDIVFEKNETQFDAKGTPFIAGKRIVPVIENHRFTGRYRDLYPANELIALLEEKGIVFRDGSNILPKLLENDDSHAIDTMVALIRSVLQMRNSNAATGEDYINSPVRDLNGVCFDSRFQNPEWPMDADANGAYHIALKGQLLLNHLKESKDLKLQNGISNQDWLAYIQELRN

SEQ ID NO: 133 - protein, 1307 aa, Artificial Sequence
  SYNTHETIC
MTQFEGFTNLYQVSKTLRFELIPQGKTLKHIQEQGFIEEDKARNDHYKELKPIIDRIYKTYADQCLQLVQLDWENLSAAIDSYRKEKTEETRNALIEEQATYRNAIHDYFIGRTDNLTDAINKRHAEIYKGLFKAELFNGKVLKQLGTVTTTEHENALLRSFDKFTTYFSGFYENRKNVFSAEDISTAIPHRIVQDNFPKFKENCHIFTRLITAVPSLREHFENVKKAIGIFVSTSIEEVFSFPFYNQLLTQTQIDLYNQLLGGISREAGTEKIKGLNEVLNLAIQKNDETAHIIASLPHRFIPLFKQILSDRNTLSFILEEFKSDEEVIQSFCKYKTLLRNENVLETAEALFNELNSIDLTHIFISHKKLETISSALCDHWDTLRNALYERRISELTGKITKSAKEKVQRSLKHEDINLQEIISAAGKELSEAFKQKTSEILSHAHAALDQPLPTTLKKQEEKEILKSQLDSLLGLYHLLDWFAVDESNEVDPEFSARLTGIKLEMEPSLSFYNKARNYATKKPYSMEKFKLNFQMPTLASGWDVNKEKNNGAILFVKNGLYYLGIMPKQKGRYKALSFEPTEKTSEGFDKMYYDYFPDAAKMIPKCSTQLKAVTAHFQTHTTPILLSNNFIEPLEITKEIYDLNNPEKEPKKFQTAYAKKTGDQKGYREALCKWIDFTRDFLSKYTKTTSIDLSSLRPSSQYKDLGEYYAELNPLLYHISFQRIAEKEIMDAVETGKLYLFQIYNKDFAKGHHGKPNLHTLYWTGLFSPENLAKTSIKLNGQAELFYRPKSRMKRMAHRLGEKMLNKKLKDQKTPIPDTLYQELYDYVNHRLSHDLSDEARALLPNVITKEVSHEIIKDRRFTSDKFFFHVPITLNYQAANSPSKFNQRVNAYLKEHPETPIIGIDRGERNLIYITVIDSTGKILEQRSLNTIQQFDYQKKLDNREKERVAARQAWSVVGTIKDLKQGYLSQVIHEIVDLMIHYQAVVVLENLNFGFKSKRTGIAEKAVYQQFEKMLIDKLNCLVLKDYPAEKVGGVLNPYQLTDQFTSFAKMGTQSGFLFYVPAPYTSKIDPLTGFVDPFVWKTIKNHESRKHFLEGFDFLHYDVKTGDFILHFKMNRNLSFQRGLPGFMPAWDIVFEKNETQFDAKGTPFIAGKRIVPVIENHRFTGRYRDLYPANELIALLEEKGIVFRDGSNILPKLLENDDSHAIDTMVALIRSVLQMRNSNAATGEDYINSPVRDLNGVCFDSRFQNPEWPMDADANGAYHIALKGQLLLNHLKESKDLKLQNGISNQDWLAYIQELRN

SEQ ID NO: 134 - protein, 1307 aa, Artificial Sequence
  SYNTHETIC
MTQFEGFTNLYQVSKTLRFELIPQGKTLKHIQEQGFIEEDKARNDHYKELKPIIDRIYKTYADQCLQLVQLDWENLSAAIDSYRKEKTEETRNALIEEQATYRNAIHDYFIGRTDNLTDAINKRHAEIYKGLFKAELFNGKVLKQLGTVTTTEHENALLRSFDKFTTYFSGFYENRKNVFSAEDISTAIPHRIVQDNFPKFKENCHIFTRLITAVPSLREHFENVKKAIGIFVSTSIEEVFSFPFYNQLLTQTQIDLYNQLLGGISREAGTEKIKGLNEVLNLAIQKNDETAHIIASLPHRFIPLFKQILSDRNTLSFILEEFKSDEEVIQSFCKYKTLLRNENVLETAEALFNELNSIDLTHIFISHKKLETISSALCDHWDTLRNALYERRISELTGKITKSAKEKVQRSLKHEDINLQEIISAAGKELSEAFKQKTSEILSHAHAALDQPLPTTLKKQEEKEILKSQLDSLLGLYHLLDWFAVDESNEVDPEFSARLTGIKLEMEPSLSFYNKARNYATKKPYSVEKFKLNFQMPTLAMGWDVNKEKNNGAILFVKNGLYYLGIMPKQKGRYKALSFEPTEKTSEGFDKMYYDYFPDAAKMIPKCSTQLKAVTAHFQTHTTPILLSNNFIEPLEITKEIYDLNNPEKEPKKFQTAYAKKTGDQKGYREALCKWIDFTRDFLSKYTKTTSIDLSSLRPSSQYKDLGEYYAELNPLLYHISFQRIAEKEIMDAVETGKLYLFQIYNKDFAKGHHGKPNLHTLYWTGLFSPENLAKTSIKLNGQAELFYRPKSRMKRMAHRLGEKMLNKKLKDQKTPIPDTLYQELYDYVNHRLSHDLSDEARALLPNVITKEVSHEIIKDRRFTSDKFFFHVPITLNYQAANSPSKFNQRVNAYLKEHPETPIIGIDRGERNLIYITVIDSTGKILEQRSLNTIQQFDYQKKLDNREKERVAARQAWSVVGTIKDLKQGYLSQVIHEIVDLMIHYQAVVVLENLNFGFKSKRTGIAEKAVYQQFEKMLIDKLNCLVLKDYPAEKVGGVLNPYQLTDQFTSFAKMGTQSGFLFYVPAPYTSKIDPLTGFVDPFVWKTIKNHESRKHFLEGFDFLHYDVKTGDFILHFKMNRNLSFQRGLPGFMPAWDIVFEKNETQFDAKGTPFIAGKRIVPVIENHRFTGRYRDLYPANELIALLEEKGIVFRDGSNILPKLLENDDSHAIDTMVALIRSVLQMRNSNAATGEDYINSPVRDLNGVCFDSRFQNPEWPMDADANGAYHIALKGQLLLNHLKESKDLKLQNGISNQDWLAYIQELRN

SEQ ID NO: 135 - protein, 1307 aa, Artificial Sequence
  SYNTHETIC
MTQFEGFTNLYQVSKTLRFELIPQGKTLKHIQEQGFIEEDKARNDHYKELKPIIDRIYKTYADQCLQLVQLDWENLSAAIDSYRKEKTEETRNALIEEQATYRNAIHDYFIGRTDNLTDAINKRHAEIYKGLFKAELFNGKVLKQLGTVTTTEHENALLRSFDKFTTYFSGFYENRKNVFSAEDISTAIPHRIVQDNFPKFKENCHIFTRLITAVPSLREHFENVKKAIGIFVSTSIEEVFSFPFYNQLLTQTQIDLYNQLLGGISREAGTEKIKGLNEVLNLAIQKNDETAHIIASLPHRFIPLFKQILSDRNTLSFILEEFKSDEEVIQSFCKYKTLLRNENVLETAEALFNELNSIDLTHIFISHKKLETISSALCDHWDTLRNALYERRISELTGKITKSAKEKVQRSLKHEDINLQEIISAAGKELSEAFKQKTSEILSHAHAALDQPLPTTLKKQEEKEILKSQLDSLLGLYHLLDWFAVDESNEVDPEFSARLTGIKLEMEPSLSFYNKARNYATKKPYSVEKFKLNFQMPTLACGWDVNKEKNNGAILFVKNGLYYLGIMPKQKGRYKALSFEPTEKTSEGFDKMYYDYFPDAAKMIPKCSTQLKAVTAHFQTHTTPILLSNNFIEPLEITKEIYDLNNPEKEPKKFQTAYAKKTGDQKGYREALCKWIDFTRDFLSKYTKTTSIDLSSLRPSSQYKDLGEYYAELNPLLYHISFQRIAEKEIMDAVETGKLYLFQIYNKDFAKGHHGKPNLHTLYWTGLFSPENLAKTSIKLNGQAELFYRPKSRMKRMAHRLGEKMLNKKLKDQKTPIPDTLYQELYDYVNHRLSHDLSDEARALLPNVITKEVSHEIIKDRRFTSDKFFFHVPITLNYQAANSPSKFNQRVNAYLKEHPETPIIGIDRGERNLIYITVIDSTGKILEQRSLNTIQQFDYQKKLDNREKERVAARQAWSVVGTIKDLKQGYLSQVIHEIVDLMIHYQAVVVLENLNFGFKSKRTGIAEKAVYQQFEKMLIDKLNCLVLKDYPAEKVGGVLNPYQLTDQFTSFAKMGTQSGFLFYVPAPYTSKIDPLTGFVDPFVWKTIKNHESRKHFLEGFDFLHYDVKTGDFILHFKMNRNLSFQRGLPGFMPAWDIVFEKNETQFDAKGTPFIAGKRIVPVIENHRFTGRYRDLYPANELIALLEEKGIVFRDGSNILPKLLENDDSHAIDTMVALIRSVLQMRNSNAATGEDYINSPVRDLNGVCFDSRFQNPEWPMDADANGAYHIALKGQLLLNHLKESKDLKLQNGISNQDWLAYIQELRN

SEQ ID NO: 136 - protein, 1307 aa, Artificial Sequence
  SYNTHETIC
MTQFEGFTNLYQVSKTLRFELIPQGKTLKHIQEQGFIEEDKARNDHYKELKPIIDRIYKTYADQCLQLVQLDWENLSAAIDSYRKEKTEETRNALIEEQATYRNAIHDYFIGRTDNLTDAINKRHAEIYKGLFKAELFNGKVLKQLGTVTTTEHENALLRSFDKFTTYFSGFYENRKNVFSAEDISTAIPHRIVQDNFPKFKENCHIFTRLITAVPSLREHFENVKKAIGIFVSTSIEEVFSFPFYNQLLTQTQIDLYNQLLGGISREAGTEKIKGLNEVLNLAIQKNDETAHIIASLPHRFIPLFKQILSDRNTLSFILEEFKSDEEVIQSFCKYKTLLRNENVLETAEALFNELNSIDLTHIFISHKKLETISSALCDHWDTLRNALYERRISELTGKITKSAKEKVQRSLKHEDINLQEIISAAGKELSEAFKQKTSEILSHAHAALDQPLPTTLKKQEEKEILKSQLDSLLGLYHLLDWFAVDESNEVDPEFSARLTGIKLEMEPSLSFYNKARNYATKKPYSVEKFKLNFQMPTLASGWDVNKERNNGAILFVKNGLYYLGIMPKQKGRYKALSFEPTEKTSEGFDKMYYDYFPDAAKMIPKCSTQLKAVTAHFQTHTTPILLSNNFIEPLEITKEIYDLNNPEKEPKKFQTAYAKKTGDQKGYREALCKWIDFTRDFLSKYTKTTSIDLSSLRPSSQYKDLGEYYAELNPLLYHISFQRIAEKEIMDAVETGKLYLFQIYNKDFAKGHHGKPNLHTLYWTGLFSPENLAKTSIKLNGQAELFYRPKSRMKRMAHRLGEKMLNKKLKDQKTPIPDTLYQELYDYVNHRLSHDLSDEARALLPNVITKEVSHEIIKDRRFTSDKFFFHVPITLNYQAANSPSKFNQRVNAYLKEHPETPIIGIDRGERNLIYITVIDSTGKILEQRSLNTIQQFDYQKKLDNREKERVAARQAWSVVGTIKDLKQGYLSQVIHEIVDLMIHYQAVVVLENLNFGFKSKRTGIAEKAVYQQFEKMLIDKLNCLVLKDYPAEKVGGVLNPYQLTDQFTSFAKMGTQSGFLFYVPAPYTSKIDPLTGFVDPFVWKTIKNHESRKHFLEGFDFLHYDVKTGDFILHFKMNRNLSFQRGLPGFMPAWDIVFEKNETQFDAKGTPFIAGKRIVPVIENHRFTGRYRDLYPANELIALLEEKGIVFRDGSNILPKLLENDDSHAIDTMVALIRSVLQMRNSNAATGEDYINSPVRDLNGVCFDSRFQNPEWPMDADANGAYHIALKGQLLLNHLKESKDLKLQNGISNQDWLAYIQELRN

SEQ ID NO: 137 - protein, 1307 aa, Artificial Sequence
  SYNTHETIC
MTQFEGFTNLYQVSKTLRFELIPQGKTLKHIQEQGFIEEDKARNDHYKELKPIIDRIYKTYADQCLQLVQLDWENLSAAIDSYRKEKTEETRNALIEEQATYRNAIHDYFIGRTDNLTDAINKRHAEIYKGLFKAELFNGKVLKQLGTVTTTEHENALLRSFDKFTTYFSGFYENRKNVFSAEDISTAIPHRIVQDNFPKFKENCHIFTRLITAVPSLREHFENVKKAIGIFVSTSIEEVFSFPFYNQLLTQTQIDLYNQLLGGISREAGTEKIKGLNEVLNLAIQKNDETAHIIASLPHRFIPLFKQILSDRNTLSFILEEFKSDEEVIQSFCKYKTLLRNENVLETAEALFNELNSIDLTHIFISHKKLETISSALCDHWDTLRNALYERRISELTGKITKSAKEKVQRSLKHEDINLQEIISAAGKELSEAFKQKTSEILSHAHAALDQPLPTTLKKQEEKEILKSQLDSLLGLYHLLDWFAVDESNEVDPEFSARLTGIKLEMEPSLSFYNKARNYATKKPYSVEKFKLNFQMPTLASGWDVNKEKDNGAILFVKNGLYYLGIMPKQKGRYKALSFEPTEKTSEGFDKMYYDYFPDAAKMIPKCSTQLKAVTAHFQTHTTPILLSNNFIEPLEITKEIYDLNNPEKEPKKFQTAYAKKTGDQKGYREALCKWIDFTRDFLSKYTKTTSIDLSSLRPSSQYKDLGEYYAELNPLLYHISFQRIAEKEIMDAVETGKLYLFQIYNKDFAKGHHGKPNLHTLYWTGLFSPENLAKTSIKLNGQAELFYRPKSRMKRMAHRLGEKMLNKKLKDQKTPIPDTLYQELYDYVNHRLSHDLSDEARALLPNVITKEVSHEIIKDRRFTSDKFFFHVPITLNYQAANSPSKFNQRVNAYLKEHPETPIIGIDRGERNLIYITVIDSTGKILEQRSLNTIQQFDYQKKLDNREKERVAARQAWSVVGTIKDLKQGYLSQVIHEIVDLMIHYQAVVVLENLNFGFKSKRTGIAEKAVYQQFEKMLIDKLNCLVLKDYPAEKVGGVLNPYQLTDQFTSFAKMGTQSGFLFYVPAPYTSKIDPLTGFVDPFVWKTIKNHESRKHFLEGFDFLHYDVKTGDFILHFKMNRNLSFQRGLPGFMPAWDIVFEKNETQFDAKGTPFIAGKRIVPVIENHRFTGRYRDLYPANELIALLEEKGIVFRDGSNILPKLLENDDSHAIDTMVALIRSVLQMRNSNAATGEDYINSPVRDLNGVCFDSRFQNPEWPMDADANGAYHIALKGQLLLNHLKESKDLKLQNGISNQDWLAYIQELRN

SEQ ID NO: 138 - protein, 1307 aa, Artificial Sequence
  SYNTHETIC
MTQFEGFTNLYQVSKTLRFELIPQGKTLKHIQEQGFIEEDKARNDHYKELKPIIDRIYKTYADQCLQLVQLDWENLSAAIDSYRKEKTEETRNALIEEQATYRNAIHDYFIGRTDNLTDAINKRHAEIYKGLFKAELFNGKVLKQLGTVTTTEHENALLRSFDKFTTYFSGFYENRKNVFSAEDISTAIPHRIVQDNFPKFKENCHIFTRLITAVPSLREHFENVKKAIGIFVSTSIEEVFSFPFYNQLLTQTQIDLYNQLLGGISREAGTEKIKGLNEVLNLAIQKNDETAHIIASLPHRFIPLFKQILSDRNTLSFILEEFKSDEEVIQSFCKYKTLLRNENVLETAEALFNELNSIDLTHIFISHKKLETISSALCDHWDTLRNALYERRISELTGKITKSAKEKVQRSLKHEDINLQEIISAAGKELSEAFKQKTSEILSHAHAALDQPLPTTLKKQEEKEILKSQLDSLLGLYHLLDWFAVDESNEVDPEFSARLTGIKLEMEPSLSFYNKARNYATKKPYSVEKFKLNFQMPTLASGWDVNKEKNNGRILFVKNGLYYLGIMPKQKGRYKALSFEPTEKTSEGFDKMYYDYFPDAAKMIPKCSTQLKAVTAHFQTHTTPILLSNNFIEPLEITKEIYDLNNPEKEPKKFQTAYAKKTGDQKGYREALCKWIDFTRDFLSKYTKTTSIDLSSLRPSSQYKDLGEYYAELNPLLYHISFQRIAEKEIMDAVETGKLYLFQIYNKDFAKGHHGKPNLHTLYWTGLFSPENLAKTSIKLNGQAELFYRPKSRMKRMAHRLGEKMLNKKLKDQKTPIPDTLYQELYDYVNHRLSHDLSDEARALLPNVITKEVSHEIIKDRRFTSDKFFFHVPITLNYQAANSPSKFNQRVNAYLKEHPETPIIGIDRGERNLIYITVIDSTGKILEQRSLNTIQQFDYQKKLDNREKERVAARQAWSVVGTIKDLKQGYLSQVIHEIVDLMIHYQAVVVLENLNFGFKSKRTGIAEKAVYQQFEKMLIDKLNCLVLKDYPAEKVGGVLNPYQLTDQFTSFAKMGTQSGFLFYVPAPYTSKIDPLTGFVDPFVWKTIKNHESRKHFLEGFDFLHYDVKTGDFILHFKMNRNLSFQRGLPGFMPAWDIVFEKNETQFDAKGTPFIAGKRIVPVIENHRFTGRYRDLYPANELIALLEEKGIVFRDGSNILPKLLENDDSHAIDTMVALIRSVLQMRNSNAATGEDYINSPVRDLNGVCFDSRFQNPEWPMDADANGAYHIALKGQLLLNHLKESKDLKLQNGISNQDWLAYIQELRN

SEQ ID NO: 139 - protein, 1307 aa, Artificial Sequence
  SYNTHETIC
MTQFEGFTNLYQVSKTLRFELIPQGKTLKHIQEQGFIEEDKARNDHYKELKPIIDRIYKTYADQCLQLVQLDWENLSAAIDSYRKEKTEETRNALIEEQATYRNAIHDYFIGRTDNLTDAINKRHAEIYKGLFKAELFNGKVLKQLGTVTTTEHENALLRSFDKFTTYFSGFYENRKNVFSAEDISTAIPHRIVQDNFPKFKENCHIFTRLITAVPSLREHFENVKKAIGIFVSTSIEEVFSFPFYNQLLTQTQIDLYNQLLGGISREAGTEKIKGLNEVLNLAIQKNDETAHIIASLPHRFIPLFKQILSDRNTLSFILEEFKSDEEVIQSFCKYKTLLRNENVLETAEALFNELNSIDLTHIFISHKKLETISSALCDHWDTLRNALYERRISELTGKITKSAKEKVQRSLKHEDINLQEIISAAGKELSEAFKQKTSEILSHAHAALDQPLPTTLKKQEEKEILKSQLDSLLGLYHLLDWFAVDESNEVDPEFSARLTGIKLEMEPSLSFYNKARNYATKKPYSVEKFKLNFQMPTLASGWDVNKEKNNGTILFVKNGLYYLGIMPKQKGRYKALSFEPTEKTSEGFDKMYYDYFPDAAKMIPKCSTQLKAVTAHFQTHTTPILLSNNFIEPLEITKEIYDLNNPEKEPKKFQTAYAKKTGDQKGYREALCKWIDFTRDFLSKYTKTTSIDLSSLRPSSQYKDLGEYYAELNPLLYHISFQRIAEKEIMDAVETGKLYLFQIYNKDFAKGHHGKPNLHTLYWTGLFSPENLAKTSIKLNGQAELFYRPKSRMKRMAHRLGEKMLNKKLKDQKTPIPDTLYQELYDYVNHRLSHDLSDEARALLPNVITKEVSHEIIKDRRFTSDKFFFHVPITLNYQAANSPSKFNQRVNAYLKEHPETPIIGIDRGERNLIYITVIDSTGKILEQRSLNTIQQFDYQKKLDNREKERVAARQAWSVVGTIKDLKQGYLSQVIHEIVDLMIHYQAVVVLENLNFGFKSKRTGIAEKAVYQQFEKMLIDKLNCLVLKDYPAEKVGGVLNPYQLTDQFTSFAKMGTQSGFLFYVPAPYTSKIDPLTGFVDPFVWKTIKNHESRKHFLEGFDFLHYDVKTGDFILHFKMNRNLSFQRGLPGFMPAWDIVFEKNETQFDAKGTPFIAGKRIVPVIENHRFTGRYRDLYPANELIALLEEKGIVFRDGSNILPKLLENDDSHAIDTMVALIRSVLQMRNSNAATGEDYINSPVRDLNGVCFDSRFQNPEWPMDADANGAYHIALKGQLLLNHLKESKDLKLQNGISNQDWLAYIQELRN

SEQ ID NO: 140 - protein, 1307 aa, Artificial Sequence
  SYNTHETIC
MTQFEGFTNLYQVSKTLRFELIPQGKTLKHIQEQGFIEEDKARNDHYKELKPIIDRIYKTYADQCLQLVQLDWENLSAAIDSYRKEKTEETRNALIEEQATYRNAIHDYFIGRTDNLTDAINKRHAEIYKGLFKAELFNGKVLKQLGTVTTTEHENALLRSFDKFTTYFSGFYENRKNVFSAEDISTAIPHRIVQDNFPKFKENCHIFTRLITAVPSLREHFENVKKAIGIFVSTSIEEVFSFPFYNQLLTQTQIDLYNQLLGGISREAGTEKIKGLNEVLNLAIQKNDETAHIIASLPHRFIPLFKQILSDRNTLSFILEEFKSDEEVIQSFCKYKTLLRNENVLETAEALFNELNSIDLTHIFISHKKLETISSALCDHWDTLRNALYERRISELTGKITKSAKEKVQRSLKHEDINLQEIISAAGKELSEAFKQKTSEILSHAHAALDQPLPTTLKKQEEKEILKSQLDSLLGLYHLLDWFAVDESNEVDPEFSARLTGIKLEMEPSLSFYNKARNYATKKPYSVEKFKLNFQMPTLASGWDVNKEKNNGVILFVKNGLYYLGIMPKQKGRYKALSFEPTEKTSEGFDKMYYDYFPDAAKMIPKCSTQLKAVTAHFQTHTTPILLSNNFIEPLEITKEIYDLNNPEKEPKKFQTAYAKKTGDQKGYREALCKWIDFTRDFLSKYTKTTSIDLSSLRPSSQYKDLGEYYAELNPLLYHISFQRIAEKEIMDAVETGKLYLFQIYNKDFAKGHHGKPNLHTLYWTGLFSPENLAKTSIKLNGQAELFYRPKSRMKRMAHRLGEKMLNKKLKDQKTPIPDTLYQELYDYVNHRLSHDLSDEARALLPNVITKEVSHEIIKDRRFTSDKFFFHVPITLNYQAANSPSKFNQRVNAYLKEHPETPIIGIDRGERNLIYITVIDSTGKILEQRSLNTIQQFDYQKKLDNREKERVAARQAWSVVGTIKDLKQGYLSQVIHEIVDLMIHYQAVVVLENLNFGFKSKRTGIAEKAVYQQFEKMLIDKLNCLVLKDYPAEKVGGVLNPYQLTDQFTSFAKMGTQSGFLFYVPAPYTSKIDPLTGFVDPFVWKTIKNHESRKHFLEGFDFLHYDVKTGDFILHFKMNRNLSFQRGLPGFMPAWDIVFEKNETQFDAKGTPFIAGKRIVPVIENHRFTGRYRDLYPANELIALLEEKGIVFRDGSNILPKLLENDDSHAIDTMVALIRSVLQMRNSNAATGEDYINSPVRDLNGVCFDSRFQNPEWPMDADANGAYHIALKGQLLLNHLKESKDLKLQNGISNQDWLAYIQELRN

SEQ ID NO: 141 - protein, 1307 aa, Artificial Sequence
  SYNTHETIC
MTQFEGFTNLYQVSKTLRFELIPQGKTLKHIQEQGFIEEDKARNDHYKELKPIIDRIYKTYADQCLQLVQLDWENLSAAIDSYRKEKTEETRNALIEEQATYRNAIHDYFIGRTDNLTDAINKRHAEIYKGLFKAELFNGKVLKQLGTVTTTEHENALLRSFDKFTTYFSGFYENRKNVFSAEDISTAIPHRIVQDNFPKFKENCHIFTRLITAVPSLREHFENVKKAIGIFVSTSIEEVFSFPFYNQLLTQTQIDLYNQLLGGISREAGTEKIKGLNEVLNLAIQKNDETAHIIASLPHRFIPLFKQILSDRNTLSFILEEFKSDEEVIQSFCKYKTLLRNENVLETAEALFNELNSIDLTHIFISHKKLETISSALCDHWDTLRNALYERRISELTGKITKSAKEKVQRSLKHEDINLQEIISAAGKELSEAFKQKTSEILSHAHAALDQPLPTTLKKQEEKEILKSQLDSLLGLYHLLDWFAVDESNEVDPEFSARLTGIKLEMEPSLSFYNKARNYATKKPYSVEKFKLNFQMPTLASGWDVNKEKNNGAVLFVKNGLYYLGIMPKQKGRYKALSFEPTEKTSEGFDKMYYDYFPDAAKMIPKCSTQLKAVTAHFQTHTTPILLSNNFIEPLEITKEIYDLNNPEKEPKKFQTAYAKKTGDQKGYREALCKWIDFTRDFLSKYTKTTSIDLSSLRPSSQYKDLGEYYAELNPLLYHISFQRIAEKEIMDAVETGKLYLFQIYNKDFAKGHHGKPNLHTLYWTGLFSPENLAKTSIKLNGQAELFYRPKSRMKRMAHRLGEKMLNKKLKDQKTPIPDTLYQELYDYVNHRLSHDLSDEARALLPNVITKEVSHEIIKDRRFTSDKFFFHVPITLNYQAANSPSKFNQRVNAYLKEHPETPIIGIDRGERNLIYITVIDSTGKILEQRSLNTIQQFDYQKKLDNREKERVAARQAWSVVGTIKDLKQGYLSQVIHEIVDLMIHYQAVVVLENLNFGFKSKRTGIAEKAVYQQFEKMLIDKLNCLVLKDYPAEKVGGVLNPYQLTDQFTSFAKMGTQSGFLFYVPAPYTSKIDPLTGFVDPFVWKTIKNHESRKHFLEGFDFLHYDVKTGDFILHFKMNRNLSFQRGLPGFMPAWDIVFEKNETQFDAKGTPFIAGKRIVPVIENHRFTGRYRDLYPANELIALLEEKGIVFRDGSNILPKLLENDDSHAIDTMVALIRSVLQMRNSNAATGEDYINSPVRDLNGVCFDSRFQNPEWPMDADANGAYHIALKGQLLLNHLKESKDLKLQNGISNQDWLAYIQELRN

SEQ ID NO: 142 - protein, 1307 aa, Artificial Sequence
  SYNTHETIC
MTQFEGFTNLYQVSKTLRFELIPQGKTLKHIQEQGFIEEDKARNDHYKELKPIIDRIYKTYADQCLQLVQLDWENLSAAIDSYRKEKTEETRNALIEEQATYRNAIHDYFIGRTDNLTDAINKRHAEIYKGLFKAELFNGKVLKQLGTVTTTEHENALLRSFDKFTTYFSGFYENRKNVFSAEDISTAIPHRIVQDNFPKFKENCHIFTRLITAVPSLREHFENVKKAIGIFVSTSIEEVFSFPFYNQLLTQTQIDLYNQLLGGISREAGTEKIKGLNEVLNLAIQKNDETAHIIASLPHRFIPLFKQILSDRNTLSFILEEFKSDEEVIQSFCKYKTLLRNENVLETAEALFNELNSIDLTHIFISHKKLETISSALCDHWDTLRNALYERRISELTGKITKSAKEKVQRSLKHEDINLQEIISAAGKELSEAFKQKTSEILSHAHAALDQPLPTTLKKQEEKEILKSQLDSLLGLYHLLDWFAVDESNEVDPEFSARLTGIKLEMEPSLSFYNKARNYATKKPYSVEKFKLNFQMPTLASGWDVNKEKNNGAIMFVKNGLYYLGIMPKQKGRYKALSFEPTEKTSEGFDKMYYDYFPDAAKMIPKCSTQLKAVTAHFQTHTTPILLSNNFIEPLEITKEIYDLNNPEKEPKKFQTAYAKKTGDQKGYREALCKWIDFTRDFLSKYTKTTSIDLSSLRPSSQYKDLGEYYAELNPLLYHISFQRIAEKEIMDAVETGKLYLFQIYNKDFAKGHHGKPNLHTLYWTGLFSPENLAKTSIKLNGQAELFYRPKSRMKRMAHRLGEKMLNKKLKDQKTPIPDTLYQELYDYVNHRLSHDLSDEARALLPNVITKEVSHEIIKDRRFTSDKFFFHVPITLNYQAANSPSKFNQRVNAYLKEHPETPIIGIDRGERNLIYITVIDSTGKILEQRSLNTIQQFDYQKKLDNREKERVAARQAWSVVGTIKDLKQGYLSQVIHEIVDLMIHYQAVVVLENLNFGFKSKRTGIAEKAVYQQFEKMLIDKLNCLVLKDYPAEKVGGVLNPYQLTDQFTSFAKMGTQSGFLFYVPAPYTSKIDPLTGFVDPFVWKTIKNHESRKHFLEGFDFLHYDVKTGDFILHFKMNRNLSFQRGLPGFMPAWDIVFEKNETQFDAKGTPFIAGKRIVPVIENHRFTGRYRDLYPANELIALLEEKGIVFRDGSNILPKLLENDDSHAIDTMVALIRSVLQMRNSNAATGEDYINSPVRDLNGVCFDSRFQNPEWPMDADANGAYHIALKGQLLLNHLKESKDLKLQNGISNQDWLAYIQELRN

SEQ ID NO: 143 - protein, 1307 aa, Artificial Sequence
  SYNTHETIC
MTQFEGFTNLYQVSKTLRFELIPQGKTLKHIQEQGFIEEDKARNDHYKELKPIIDRIYKTYADQCLQLVQLDWENLSAAIDSYRKEKTEETRNALIEEQATYRNAIHDYFIGRTDNLTDAINKRHAEIYKGLFKAELFNGKVLKQLGTVTTTEHENALLRSFDKFTTYFSGFYENRKNVFSAEDISTAIPHRIVQDNFPKFKENCHIFTRLITAVPSLREHFENVKKAIGIFVSTSIEEVFSFPFYNQLLTQTQIDLYNQLLGGISREAGTEKIKGLNEVLNLAIQKNDETAHIIASLPHRFIPLFKQILSDRNTLSFILEEFKSDEEVIQSFCKYKTLLRNENVLETAEALFNELNSIDLTHIFISHKKLETISSALCDHWDTLRNALYERRISELTGKITKSAKEKVQRSLKHEDINLQEIISAAGKELSEAFKQKTSEILSHAHAALDQPLPTTLKKQEEKEILKSQLDSLLGLYHLLDWFAVDESNEVDPEFSARLTGIKLEMEPSLSFYNKARNYATKKPYSVEKFKLNFQMPTLASGWDVNKEKNNGAILFMKNGLYYLGIMPKQKGRYKALSFEPTEKTSEGFDKMYYDYFPDAAKMIPKCSTQLKAVTAHFQTHTTPILLSNNFIEPLEITKEIYDLNNPEKEPKKFQTAYAKKTGDQKGYREALCKWIDFTRDFLSKYTKTTSIDLSSLRPSSQYKDLGEYYAELNPLLYHISFQRIAEKEIMDAVETGKLYLFQIYNKDFAKGHHGKPNLHTLYWTGLFSPENLAKTSIKLNGQAELFYRPKSRMKRMAHRLGEKMLNKKLKDQKTPIPDTLYQELYDYVNHRLSHDLSDEARALLPNVITKEVSHEIIKDRRFTSDKFFFHVPITLNYQAANSPSKFNQRVNAYLKEHPETPIIGIDRGERNLIYITVIDSTGKILEQRSLNTIQQFDYQKKLDNREKERVAARQAWSVVGTIKDLKQGYLSQVIHEIVDLMIHYQAVVVLENLNFGFKSKRTGIAEKAVYQQFEKMLIDKLNCLVLKDYPAEKVGGVLNPYQLTDQFTSFAKMGTQSGFLFYVPAPYTSKIDPLTGFVDPFVWKTIKNHESRKHFLEGFDFLHYDVKTGDFILHFKMNRNLSFQRGLPGFMPAWDIVFEKNETQFDAKGTPFIAGKRIVPVIENHRFTGRYRDLYPANELIALLEEKGIVFRDGSNILPKLLENDDSHAIDTMVALIRSVLQMRNSNAATGEDYINSPVRDLNGVCFDSRFQNPEWPMDADANGAYHIALKGQLLLNHLKESKDLKLQNGISNQDWLAYIQELRN

SEQ ID NO: 144 - protein, 1307 aa, Artificial Sequence
  SYNTHETIC
MTQFEGFTNLYQVSKTLRFELIPQGKTLKHIQEQGFIEEDKARNDHYKELKPIIDRIYKTYADQCLQLVQLDWENLSAAIDSYRKEKTEETRNALIEEQATYRNAIHDYFIGRTDNLTDAINKRHAEIYKGLFKAELFNGKVLKQLGTVTTTEHENALLRSFDKFTTYFSGFYENRKNVFSAEDISTAIPHRIVQDNFPKFKENCHIFTRLITAVPSLREHFENVKKAIGIFVSTSIEEVFSFPFYNQLLTQTQIDLYNQLLGGISREAGTEKIKGLNEVLNLAIQKNDETAHIIASLPHRFIPLFKQILSDRNTLSFILEEFKSDEEVIQSFCKYKTLLRNENVLETAEALFNELNSIDLTHIFISHKKLETISSALCDHWDTLRNALYERRISELTGKITKSAKEKVQRSLKHEDINLQEIISAAGKELSEAFKQKTSEILSHAHAALDQPLPTTLKKQEEKEILKSQLDSLLGLYHLLDWFAVDESNEVDPEFSARLTGIKLEMEPSLSFYNKARNYATKKPYSVEKFKLNFQMPTLASGWDVNKEKNNGAILFVANGLYYLGIMPKQKGRYKALSFEPTEKTSEGFDKMYYDYFPDAAKMIPKCSTQLKAVTAHFQTHTTPILLSNNFIEPLEITKEIYDLNNPEKEPKKFQTAYAKKTGDQKGYREALCKWIDFTRDFLSKYTKTTSIDLSSLRPSSQYKDLGEYYAELNPLLYHISFQRIAEKEIMDAVETGKLYLFQIYNKDFAKGHHGKPNLHTLYWTGLFSPENLAKTSIKLNGQAELFYRPKSRMKRMAHRLGEKMLNKKLKDQKTPIPDTLYQELYDYVNHRLSHDLSDEARALLPNVITKEVSHEIIKDRRFTSDKFFFHVPITLNYQAANSPSKFNQRVNAYLKEHPETPIIGIDRGERNLIYITVIDSTGKILEQRSLNTIQQFDYQKKLDNREKERVAARQAWSVVGTIKDLKQGYLSQVIHEIVDLMIHYQAVVVLENLNFGFKSKRTGIAEKAVYQQFEKMLIDKLNCLVLKDYPAEKVGGVLNPYQLTDQFTSFAKMGTQSGFLFYVPAPYTSKIDPLTGFVDPFVWKTIKNHESRKHFLEGFDFLHYDVKTGDFILHFKMNRNLSFQRGLPGFMPAWDIVFEKNETQFDAKGTPFIAGKRIVPVIENHRFTGRYRDLYPANELIALLEEKGIVFRDGSNILPKLLENDDSHAIDTMVALIRSVLQMRNSNAATGEDYINSPVRDLNGVCFDSRFQNPEWPMDADANGAYHIALKGQLLLNHLKESKDLKLQNGISNQDWLAYIQELRN

SEQ ID NO: 145 - protein, 1307 aa, Artificial Sequence
  SYNTHETIC
MTQFEGFTNLYQVSKTLRFELIPQGKTLKHIQEQGFIEEDKARNDHYKELKPIIDRIYKTYADQCLQLVQLDWENLSAAIDSYRKEKTEETRNALIEEQATYRNAIHDYFIGRTDNLTDAINKRHAEIYKGLFKAELFNGKVLKQLGTVTTTEHENALLRSFDKFTTYFSGFYENRKNVFSAEDISTAIPHRIVQDNFPKFKENCHIFTRLITAVPSLREHFENVKKAIGIFVSTSIEEVFSFPFYNQLLTQTQIDLYNQLLGGISREAGTEKIKGLNEVLNLAIQKNDETAHIIASLPHRFIPLFKQILSDRNTLSFILEEFKSDEEVIQSFCKYKTLLRNENVLETAEALFNELNSIDLTHIFISHKKLETISSALCDHWDTLRNALYERRISELTGKITKSAKEKVQRSLKHEDINLQEIISAAGKELSEAFKQKTSEILSHAHAALDQPLPTTLKKQEEKEILKSQLDSLLGLYHLLDWFAVDESNEVDPEFSARLTGIKLEMEPSLSFYNKARNYATKKPYSVEKFKLNFQMPTLASGWDVNKEKNNGAILFVKAGLYYLGIMPKQKGRYKALSFEPTEKTSEGFDKMYYDYFPDAAKMIPKCSTQLKAVTAHFQTHTTPILLSNNFIEPLEITKEIYDLNNPEKEPKKFQTAYAKKTGDQKGYREALCKWIDFTRDFLSKYTKTTSIDLSSLRPSSQYKDLGEYYAELNPLLYHISFQRIAEKEIMDAVETGKLYLFQIYNKDFAKGHHGKPNLHTLYWTGLFSPENLAKTSIKLNGQAELFYRPKSRMKRMAHRLGEKMLNKKLKDQKTPIPDTLYQELYDYVNHRLSHDLSDEARALLPNVITKEVSHEIIKDRRFTSDKFFFHVPITLNYQAANSPSKFNQRVNAYLKEHPETPIIGIDRGERNLIYITVIDSTGKILEQRSLNTIQQFDYQKKLDNREKERVAARQAWSVVGTIKDLKQGYLSQVIHEIVDLMIHYQAVVVLENLNFGFKSKRTGIAEKAVYQQFEKMLIDKLNCLVLKDYPAEKVGGVLNPYQLTDQFTSFAKMGTQSGFLFYVPAPYTSKIDPLTGFVDPFVWKTIKNHESRKHFLEGFDFLHYDVKTGDFILHFKMNRNLSFQRGLPGFMPAWDIVFEKNETQFDAKGTPFIAGKRIVPVIENHRFTGRYRDLYPANELIALLEEKGIVFRDGSNILPKLLENDDSHAIDTMVALIRSVLQMRNSNAATGEDYINSPVRDLNGVCFDSRFQNPEWPMDADANGAYHIALKGQLLLNHLKESKDLKLQNGISNQDWLAYIQELRN

SEQ ID NO: 146 - protein, 1307 aa, Artificial Sequence
  SYNTHETIC
MTQFEGFTNLYQVSKTLRFELIPQGKTLKHIQEQGFIEEDKARNDHYKELKPIIDRIYKTYADQCLQLVQLDWENLSAAIDSYRKEKTEETRNALIEEQATYRNAIHDYFIGRTDNLTDAINKRHAEIYKGLFKAELFNGKVLKQLGTVTTTEHENALLRSFDKFTTYFSGFYENRKNVFSAEDISTAIPHRIVQDNFPKFKENCHIFTRLITAVPSLREHFENVKKAIGIFVSTSIEEVFSFPFYNQLLTQTQIDLYNQLLGGISREAGTEKIKGLNEVLNLAIQKNDETAHIIASLPHRFIPLFKQILSDRNTLSFILEEFKSDEEVIQSFCKYKTLLRNENVLETAEALFNELNSIDLTHIFISHKKLETISSALCDHWDTLRNALYERRISELTGKITKSAKEKVQRSLKHEDINLQEIISAAGKELSEAFKQKTSEILSHAHAALDQPLPTTLKKQEEKEILKSQLDSLLGLYHLLDWFAVDESNEVDPEFSARLTGIKLEMEPSLSFYNKARNYATKKPYSVEKFKLNFQMPTLASGWDVNKEKNNGAILFVKDGLYYLGIMPKQKGRYKALSFEPTEKTSEGFDKMYYDYFPDAAKMIPKCSTQLKAVTAHFQTHTTPILLSNNFIEPLEITKEIYDLNNPEKEPKKFQTAYAKKTGDQKGYREALCKWIDFTRDFLSKYTKTTSIDLSSLRPSSQYKDLGEYYAELNPLLYHISFQRIAEKEIMDAVETGKLYLFQIYNKDFAKGHHGKPNLHTLYWTGLFSPENLAKTSIKLNGQAELFYRPKSRMKRMAHRLGEKMLNKKLKDQKTPIPDTLYQELYDYVNHRLSHDLSDEARALLPNVITKEVSHEIIKDRRFTSDKFFFHVPITLNYQAANSPSKFNQRVNAYLKEHPETPIIGIDRGERNLIYITVIDSTGKILEQRSLNTIQQFDYQKKLDNREKERVAARQAWSVVGTIKDLKQGYLSQVIHEIVDLMIHYQAVVVLENLNFGFKSKRTGIAEKAVYQQFEKMLIDKLNCLVLKDYPAEKVGGVLNPYQLTDQFTSFAKMGTQSGFLFYVPAPYTSKIDPLTGFVDPFVWKTIKNHESRKHFLEGFDFLHYDVKTGDFILHFKMNRNLSFQRGLPGFMPAWDIVFEKNETQFDAKGTPFIAGKRIVPVIENHRFTGRYRDLYPANELIALLEEKGIVFRDGSNILPKLLENDDSHAIDTMVALIRSVLQMRNSNAATGEDYINSPVRDLNGVCFDSRFQNPEWPMDADANGAYHIALKGQLLLNHLKESKDLKLQNGISNQDWLAYIQELRN

SEQ ID NO: 147 - protein, 1307 aa, Artificial Sequence
  SYNTHETIC
MTQFEGFTNLYQVSKTLRFELIPQGKTLKHIQEQGFIEEDKARNDHYKELKPIIDRIYKTYADQCLQLVQLDWENLSAAIDSYRKEKTEETRNALIEEQATYRNAIHDYFIGRTDNLTDAINKRHAEIYKGLFKAELFNGKVLKQLGTVTTTEHENALLRSFDKFTTYFSGFYENRKNVFSAEDISTAIPHRIVQDNFPKFKENCHIFTRLITAVPSLREHFENVKKAIGIFVSTSIEEVFSFPFYNQLLTQTQIDLYNQLLGGISREAGTEKIKGLNEVLNLAIQKNDETAHIIASLPHRFIPLFKQILSDRNTLSFILEEFKSDEEVIQSFCKYKTLLRNENVLETAEALFNELNSIDLTHIFISHKKLETISSALCDHWDTLRNALYERRISELTGKITKSAKEKVQRSLKHEDINLQEIISAAGKELSEAFKQKTSEILSHAHAALDQPLPTTLKKQEEKEILKSQLDSLLGLYHLLDWFAVDESNEVDPEFSARLTGIKLEMEPSLSFYNKARNYATKKPYSVEKFKLNFQMPTLASGWDVNKEKNNGAILFVKEGLYYLGIMPKQKGRYKALSFEPTEKTSEGFDKMYYDYFPDAAKMIPKCSTQLKAVTAHFQTHTTPILLSNNFIEPLEITKEIYDLNNPEKEPKKFQTAYAKKTGDQKGYREALCKWIDFTRDFLSKYTKTTSIDLSSLRPSSQYKDLGEYYAELNPLLYHISFQRIAEKEIMDAVETGKLYLFQIYNKDFAKGHHGKPNLHTLYWTGLFSPENLAKTSIKLNGQAELFYRPKSRMKRMAHRLGEKMLNKKLKDQKTPIPDTLYQELYDYVNHRLSHDLSDEARALLPNVITKEVSHEIIKDRRFTSDKFFFHVPITLNYQAANSPSKFNQRVNAYLKEHPETPIIGIDRGERNLIYITVIDSTGKILEQRSLNTIQQFDYQKKLDNREKERVAARQAWSVVGTIKDLKQGYLSQVIHEIVDLMIHYQAVVVLENLNFGFKSKRTGIAEKAVYQQFEKMLIDKLNCLVLKDYPAEKVGGVLNPYQLTDQFTSFAKMGTQSGFLFYVPAPYTSKIDPLTGFVDPFVWKTIKNHESRKHFLEGFDFLHYDVKTGDFILHFKMNRNLSFQRGLPGFMPAWDIVFEKNETQFDAKGTPFIAGKRIVPVIENHRFTGRYRDLYPANELIALLEEKGIVFRDGSNILPKLLENDDSHAIDTMVALIRSVLQMRNSNAATGEDYINSPVRDLNGVCFDSRFQNPEWPMDADANGAYHIALKGQLLLNHLKESKDLKLQNGISNQDWLAYIQELRN

SEQ ID NO: 148 - protein, 1307 aa, Artificial Sequence
  SYNTHETIC
MTQFEGFTNLYQVSKTLRFELIPQGKTLKHIQEQGFIEEDKARNDHYKELKPIIDRIYKTYADQCLQLVQLDWENLSAAIDSYRKEKTEETRNALIEEQATYRNAIHDYFIGRTDNLTDAINKRHAEIYKGLFKAELFNGKVLKQLGTVTTTEHENALLRSFDKFTTYFSGFYENRKNVFSAEDISTAIPHRIVQDNFPKFKENCHIFTRLITAVPSLREHFENVKKAIGIFVSTSIEEVFSFPFYNQLLTQTQIDLYNQLLGGISREAGTEKIKGLNEVLNLAIQKNDETAHIIASLPHRFIPLFKQILSDRNTLSFILEEFKSDEEVIQSFCKYKTLLRNENVLETAEALFNELNSIDLTHIFISHKKLETISSALCDHWDTLRNALYERRISELTGKITKSAKEKVQRSLKHEDINLQEIISAAGKELSEAFKQKTSEILSHAHAALDQPLPTTLKKQEEKEILKSQLDSLLGLYHLLDWFAVDESNEVDPEFSARLTGIKLEMEPSLSFYNKARNYATKKPYSVEKFKLNFQMPTLASGWDVNKEKNNGAILFVKMGLYYLGIMPKQKGRYKALSFEPTEKTSEGFDKMYYDYFPDAAKMIPKCSTQLKAVTAHFQTHTTPILLSNNFIEPLEITKEIYDLNNPEKEPKKFQTAYAKKTGDQKGYREALCKWIDFTRDFLSKYTKTTSIDLSSLRPSSQYKDLGEYYAELNPLLYHISFQRIAEKEIMDAVETGKLYLFQIYNKDFAKGHHGKPNLHTLYWTGLFSPENLAKTSIKLNGQAELFYRPKSRMKRMAHRLGEKMLNKKLKDQKTPIPDTLYQELYDYVNHRLSHDLSDEARALLPNVITKEVSHEIIKDRRFTSDKFFFHVPITLNYQAANSPSKFNQRVNAYLKEHPETPIIGIDRGERNLIYITVIDSTGKILEQRSLNTIQQFDYQKKLDNREKERVAARQAWSVVGTIKDLKQGYLSQVIHEIVDLMIHYQAVVVLENLNFGFKSKRTGIAEKAVYQQFEKMLIDKLNCLVLKDYPAEKVGGVLNPYQLTDQFTSFAKMGTQSGFLFYVPAPYTSKIDPLTGFVDPFVWKTIKNHESRKHFLEGFDFLHYDVKTGDFILHFKMNRNLSFQRGLPGFMPAWDIVFEKNETQFDAKGTPFIAGKRIVPVIENHRFTGRYRDLYPANELIALLEEKGIVFRDGSNILPKLLENDDSHAIDTMVALIRSVLQMRNSNAATGEDYINSPVRDLNGVCFDSRFQNPEWPMDADANGAYHIALKGQLLLNHLKESKDLKLQNGISNQDWLAYIQELRN

SEQ ID NO: 149 - protein, 1307 aa, Artificial Sequence
  SYNTHETIC
MTQFEGFTNLYQVSKTLRFELIPQGKTLKHIQEQGFIEEDKARNDHYKELKPIIDRIYKTYADQCLQLVQLDWENLSAAIDSYRKEKTEETRNALIEEQATYRNAIHDYFIGRTDNLTDAINKRHAEIYKGLFKAELFNGKVLKQLGTVTTTEHENALLRSFDKFTTYFSGFYENRKNVFSAEDISTAIPHRIVQDNFPKFKENCHIFTRLITAVPSLREHFENVKKAIGIFVSTSIEEVFSFPFYNQLLTQTQIDLYNQLLGGISREAGTEKIKGLNEVLNLAIQKNDETAHIIASLPHRFIPLFKQILSDRNTLSFILEEFKSDEEVIQSFCKYKTLLRNENVLETAEALFNELNSIDLTHIFISHKKLETISSALCDHWDTLRNALYERRISELTGKITKSAKEKVQRSLKHEDINLQEIISAAGKELSEAFKQKTSEILSHAHAALDQPLPTTLKKQEEKEILKSQLDSLLGLYHLLDWFAVDESNEVDPEFSARLTGIKLEMEPSLSFYNKARNYATKKPYSVEKFKLNFQMPTLASGWDVNKEKNNGAILFVKNGLYYLGIMDKQKGRYKALSFEPTEKTSEGFDKMYYDYFPDAAKMIPKCSTQLKAVTAHFQTHTTPILLSNNFIEPLEITKEIYDLNNPEKEPKKFQTAYAKKTGDQKGYREALCKWIDFTRDFLSKYTKTTSIDLSSLRPSSQYKDLGEYYAELNPLLYHISFQRIAEKEIMDAVETGKLYLFQIYNKDFAKGHHGKPNLHTLYWTGLFSPENLAKTSIKLNGQAELFYRPKSRMKRMAHRLGEKMLNKKLKDQKTPIPDTLYQELYDYVNHRLSHDLSDEARALLPNVITKEVSHEIIKDRRFTSDKFFFHVPITLNYQAANSPSKFNQRVNAYLKEHPETPIIGIDRGERNLIYITVIDSTGKILEQRSLNTIQQFDYQKKLDNREKERVAARQAWSVVGTIKDLKQGYLSQVIHEIVDLMIHYQAVVVLENLNFGFKSKRTGIAEKAVYQQFEKMLIDKLNCLVLKDYPAEKVGGVLNPYQLTDQFTSFAKMGTQSGFLFYVPAPYTSKIDPLTGFVDPFVWKTIKNHESRKHFLEGFDFLHYDVKTGDFILHFKMNRNLSFQRGLPGFMPAWDIVFEKNETQFDAKGTPFIAGKRIVPVIENHRFTGRYRDLYPANELIALLEEKGIVFRDGSNILPKLLENDDSHAIDTMVALIRSVLQMRNSNAATGEDYINSPVRDLNGVCFDSRFQNPEWPMDADANGAYHIALKGQLLLNHLKESKDLKLQNGISNQDWLAYIQELRN

SEQ ID NO: 150 - protein, 1307 aa, Artificial Sequence
  SYNTHETIC
MTQFEGFTNLYQVSKTLRFELIPQGKTLKHIQEQGFIEEDKARNDHYKELKPIIDRIYKTYADQCLQLVQLDWENLSAAIDSYRKEKTEETRNALIEEQATYRNAIHDYFIGRTDNLTDAINKRHAEIYKGLFKAELFNGKVLKQLGTVTTTEHENALLRSFDKFTTYFSGFYENRKNVFSAEDISTAIPHRIVQDNFPKFKENCHIFTRLITAVPSLREHFENVKKAIGIFVSTSIEEVFSFPFYNQLLTQTQIDLYNQLLGGISREAGTEKIKGLNEVLNLAIQKNDETAHIIASLPHRFIPLFKQILSDRNTLSFILEEFKSDEEVIQSFCKYKTLLRNENVLETAEALFNELNSIDLTHIFISHKKLETISSALCDHWDTLRNALYERRISELTGKITKSAKEKVQRSLKHEDINLQEIISAAGKELSEAFKQKTSEILSHAHAALDQPLPTTLKKQEEKEILKSQLDSLLGLYHLLDWFAVDESNEVDPEFSARLTGIKLEMEPSLSFYNKARNYATKKPYSVEKFKLNFQMPTLASGWDVNKEKNNGAILFVKNGLYYLGIMPKAKGRYKALSFEPTEKTSEGFDKMYYDYFPDAAKMIPKCSTQLKAVTAHFQTHTTPILLSNNFIEPLEITKEIYDLNNPEKEPKKFQTAYAKKTGDQKGYREALCKWIDFTRDFLSKYTKTTSIDLSSLRPSSQYKDLGEYYAELNPLLYHISFQRIAEKEIMDAVETGKLYLFQIYNKDFAKGHHGKPNLHTLYWTGLFSPENLAKTSIKLNGQAELFYRPKSRMKRMAHRLGEKMLNKKLKDQKTPIPDTLYQELYDYVNHRLSHDLSDEARALLPNVITKEVSHEIIKDRRFTSDKFFFHVPITLNYQAANSPSKFNQRVNAYLKEHPETPIIGIDRGERNLIYITVIDSTGKILEQRSLNTIQQFDYQKKLDNREKERVAARQAWSVVGTIKDLKQGYLSQVIHEIVDLMIHYQAVVVLENLNFGFKSKRTGIAEKAVYQQFEKMLIDKLNCLVLKDYPAEKVGGVLNPYQLTDQFTSFAKMGTQSGFLFYVPAPYTSKIDPLTGFVDPFVWKTIKNHESRKHFLEGFDFLHYDVKTGDFILHFKMNRNLSFQRGLPGFMPAWDIVFEKNETQFDAKGTPFIAGKRIVPVIENHRFTGRYRDLYPANELIALLEEKGIVFRDGSNILPKLLENDDSHAIDTMVALIRSVLQMRNSNAATGEDYINSPVRDLNGVCFDSRFQNPEWPMDADANGAYHIALKGQLLLNHLKESKDLKLQNGISNQDWLAYIQELRN

SEQ ID NO: 151 - protein, 1307 aa, Artificial Sequence
  SYNTHETIC
MTQFEGFTNLYQVSKTLRFELIPQGKTLKHIQEQGFIEEDKARNDHYKELKPIIDRIYKTYADQCLQLVQLDWENLSAAIDSYRKEKTEETRNALIEEQATYRNAIHDYFIGRTDNLTDAINKRHAEIYKGLFKAELFNGKVLKQLGTVTTTEHENALLRSFDKFTTYFSGFYENRKNVFSAEDISTAIPHRIVQDNFPKFKENCHIFTRLITAVPSLREHFENVKKAIGIFVSTSIEEVFSFPFYNQLLTQTQIDLYNQLLGGISREAGTEKIKGLNEVLNLAIQKNDETAHIIASLPHRFIPLFKQILSDRNTLSFILEEFKSDEEVIQSFCKYKTLLRNENVLETAEALFNELNSIDLTHIFISHKKLETISSALCDHWDTLRNALYERRISELTGKITKSAKEKVQRSLKHEDINLQEIISAAGKELSEAFKQKTSEILSHAHAALDQPLPTTLKKQEEKEILKSQLDSLLGLYHLLDWFAVDESNEVDPEFSARLTGIKLEMEPSLSFYNKARNYATKKPYSVEKFKLNFQMPTLASGWDVNKEKNNGAILFVKNGLYYLGIMPKPKGRYKALSFEPTEKTSEGFDKMYYDYFPDAAKMIPKCSTQLKAVTAHFQTHTTPILLSNNFIEPLEITKEIYDLNNPEKEPKKFQTAYAKKTGDQKGYREALCKWIDFTRDFLSKYTKTTSIDLSSLRPSSQYKDLGEYYAELNPLLYHISFQRIAEKEIMDAVETGKLYLFQIYNKDFAKGHHGKPNLHTLYWTGLFSPENLAKTSIKLNGQAELFYRPKSRMKRMAHRLGEKMLNKKLKDQKTPIPDTLYQELYDYVNHRLSHDLSDEARALLPNVITKEVSHEIIKDRRFTSDKFFFHVPITLNYQAANSPSKFNQRVNAYLKEHPETPIIGIDRGERNLIYITVIDSTGKILEQRSLNTIQQFDYQKKLDNREKERVAARQAWSVVGTIKDLKQGYLSQVIHEIVDLMIHYQAVVVLENLNFGFKSKRTGIAEKAVYQQFEKMLIDKLNCLVLKDYPAEKVGGVLNPYQLTDQFTSFAKMGTQSGFLFYVPAPYTSKIDPLTGFVDPFVWKTIKNHESRKHFLEGFDFLHYDVKTGDFILHFKMNRNLSFQRGLPGFMPAWDIVFEKNETQFDAKGTPFIAGKRIVPVIENHRFTGRYRDLYPANELIALLEEKGIVFRDGSNILPKLLENDDSHAIDTMVALIRSVLQMRNSNAATGEDYINSPVRDLNGVCFDSRFQNPEWPMDADANGAYHIALKGQLLLNHLKESKDLKLQNGISNQDWLAYIQELRN

SEQ ID NO: 152 - protein, 1307 aa, Artificial Sequence
  SYNTHETIC
MTQFEGFTNLYQVSKTLRFELIPQGKTLKHIQEQGFIEEDKARNDHYKELKPIIDRIYKTYADQCLQLVQLDWENLSAAIDSYRKEKTEETRNALIEEQATYRNAIHDYFIGRTDNLTDAINKRHAEIYKGLFKAELFNGKVLKQLGTVTTTEHENALLRSFDKFTTYFSGFYENRKNVFSAEDISTAIPHRIVQDNFPKFKENCHIFTRLITAVPSLREHFENVKKAIGIFVSTSIEEVFSFPFYNQLLTQTQIDLYNQLLGGISREAGTEKIKGLNEVLNLAIQKNDETAHIIASLPHRFIPLFKQILSDRNTLSFILEEFKSDEEVIQSFCKYKTLLRNENVLETAEALFNELNSIDLTHIFISHKKLETISSALCDHWDTLRNALYERRISELTGKITKSAKEKVQRSLKHEDINLQEIISAAGKELSEAFKQKTSEILSHAHAALDQPLPTTLKKQEEKEILKSQLDSLLGLYHLLDWFAVDESNEVDPEFSARLTGIKLEMEPSLSFYNKARNYATKKPYSVEKFKLNFQMPTLASGWDVNKEKNNGAILFVKNGLYYLGIMPKSKGRYKALSFEPTEKTSEGFDKMYYDYFPDAAKMIPKCSTQLKAVTAHFQTHTTPILLSNNFIEPLEITKEIYDLNNPEKEPKKFQTAYAKKTGDQKGYREALCKWIDFTRDFLSKYTKTTSIDLSSLRPSSQYKDLGEYYAELNPLLYHISFQRIAEKEIMDAVETGKLYLFQIYNKDFAKGHHGKPNLHTLYWTGLFSPENLAKTSIKLNGQAELFYRPKSRMKRMAHRLGEKMLNKKLKDQKTPIPDTLYQELYDYVNHRLSHDLSDEARALLPNVITKEVSHEIIKDRRFTSDKFFFHVPITLNYQAANSPSKFNQRVNAYLKEHPETPIIGIDRGERNLIYITVIDSTGKILEQRSLNTIQQFDYQKKLDNREKERVAARQAWSVVGTIKDLKQGYLSQVIHEIVDLMIHYQAVVVLENLNFGFKSKRTGIAEKAVYQQFEKMLIDKLNCLVLKDYPAEKVGGVLNPYQLTDQFTSFAKMGTQSGFLFYVPAPYTSKIDPLTGFVDPFVWKTIKNHESRKHFLEGFDFLHYDVKTGDFILHFKMNRNLSFQRGLPGFMPAWDIVFEKNETQFDAKGTPFIAGKRIVPVIENHRFTGRYRDLYPANELIALLEEKGIVFRDGSNILPKLLENDDSHAIDTMVALIRSVLQMRNSNAATGEDYINSPVRDLNGVCFDSRFQNPEWPMDADANGAYHIALKGQLLLNHLKESKDLKLQNGISNQDWLAYIQELRN

SEQ ID NO: 153 - protein, 1307 aa, Artificial Sequence
  SYNTHETIC
MTQFEGFTNLYQVSKTLRFELIPQGKTLKHIQEQGFIEEDKARNDHYKELKPIIDRIYKTYADQCLQLVQLDWENLSAAIDSYRKEKTEETRNALIEEQATYRNAIHDYFIGRTDNLTDAINKRHAEIYKGLFKAELFNGKVLKQLGTVTTTEHENALLRSFDKFTTYFSGFYENRKNVFSAEDISTAIPHRIVQDNFPKFKENCHIFTRLITAVPSLREHFENVKKAIGIFVSTSIEEVFSFPFYNQLLTQTQIDLYNQLLGGISREAGTEKIKGLNEVLNLAIQKNDETAHIIASLPHRFIPLFKQILSDRNTLSFILEEFKSDEEVIQSFCKYKTLLRNENVLETAEALFNELNSIDLTHIFISHKKLETISSALCDHWDTLRNALYERRISELTGKITKSAKEKVQRSLKHEDINLQEIISAAGKELSEAFKQKTSEILSHAHAALDQPLPTTLKKQEEKEILKSQLDSLLGLYHLLDWFAVDESNEVDPEFSARLTGIKLEMEPSLSFYNKARNYATKKPYSVEKFKLNFQMPTLASGWDVNKEKNNGAILFVKNGLYYLGIMPKTKGRYKALSFEPTEKTSEGFDKMYYDYFPDAAKMIPKCSTQLKAVTAHFQTHTTPILLSNNFIEPLEITKEIYDLNNPEKEPKKFQTAYAKKTGDQKGYREALCKWIDFTRDFLSKYTKTTSIDLSSLRPSSQYKDLGEYYAELNPLLYHISFQRIAEKEIMDAVETGKLYLFQIYNKDFAKGHHGKPNLHTLYWTGLFSPENLAKTSIKLNGQAELFYRPKSRMKRMAHRLGEKMLNKKLKDQKTPIPDTLYQELYDYVNHRLSHDLSDEARALLPNVITKEVSHEIIKDRRFTSDKFFFHVPITLNYQAANSPSKFNQRVNAYLKEHPETPIIGIDRGERNLIYITVIDSTGKILEQRSLNTIQQFDYQKKLDNREKERVAARQAWSVVGTIKDLKQGYLSQVIHEIVDLMIHYQAVVVLENLNFGFKSKRTGIAEKAVYQQFEKMLIDKLNCLVLKDYPAEKVGGVLNPYQLTDQFTSFAKMGTQSGFLFYVPAPYTSKIDPLTGFVDPFVWKTIKNHESRKHFLEGFDFLHYDVKTGDFILHFKMNRNLSFQRGLPGFMPAWDIVFEKNETQFDAKGTPFIAGKRIVPVIENHRFTGRYRDLYPANELIALLEEKGIVFRDGSNILPKLLENDDSHAIDTMVALIRSVLQMRNSNAATGEDYINSPVRDLNGVCFDSRFQNPEWPMDADANGAYHIALKGQLLLNHLKESKDLKLQNGISNQDWLAYIQELRN

SEQ ID NO: 154 - protein, 1307 aa, Artificial Sequence
  SYNTHETIC
MTQFEGFTNLYQVSKTLRFELIPQGKTLKHIQEQGFIEEDKARNDHYKELKPIIDRIYKTYADQCLQLVQLDWENLSAAIDSYRKEKTEETRNALIEEQATYRNAIHDYFIGRTDNLTDAINKRHAEIYKGLFKAELFNGKVLKQLGTVTTTEHENALLRSFDKFTTYFSGFYENRKNVFSAEDISTAIPHRIVQDNFPKFKENCHIFTRLITAVPSLREHFENVKKAIGIFVSTSIEEVFSFPFYNQLLTQTQIDLYNQLLGGISREAGTEKIKGLNEVLNLAIQKNDETAHIIASLPHRFIPLFKQILSDRNTLSFILEEFKSDEEVIQSFCKYKTLLRNENVLETAEALFNELNSIDLTHIFISHKKLETISSALCDHWDTLRNALYERRISELTGKITKSAKEKVQRSLKHEDINLQEIISAAGKELSEAFKQKTSEILSHAHAALDQPLPTTLKKQEEKEILKSQLDSLLGLYHLLDWFAVDESNEVDPEFSARLTGIKLEMEPSLSFYNKARNYATKKPYSVEKFKLNFQMPTLASGWDVNKEKNNGAILFVKNGLYYLGIMPKQEGRYKALSFEPTEKTSEGFDKMYYDYFPDAAKMIPKCSTQLKAVTAHFQTHTTPILLSNNFIEPLEITKEIYDLNNPEKEPKKFQTAYAKKTGDQKGYREALCKWIDFTRDFLSKYTKTTSIDLSSLRPSSQYKDLGEYYAELNPLLYHISFQRIAEKEIMDAVETGKLYLFQIYNKDFAKGHHGKPNLHTLYWTGLFSPENLAKTSIKLNGQAELFYRPKSRMKRMAHRLGEKMLNKKLKDQKTPIPDTLYQELYDYVNHRLSHDLSDEARALLPNVITKEVSHEIIKDRRFTSDKFFFHVPITLNYQAANSPSKFNQRVNAYLKEHPETPIIGIDRGERNLIYITVIDSTGKILEQRSLNTIQQFDYQKKLDNREKERVAARQAWSVVGTIKDLKQGYLSQVIHEIVDLMIHYQAVVVLENLNFGFKSKRTGIAEKAVYQQFEKMLIDKLNCLVLKDYPAEKVGGVLNPYQLTDQFTSFAKMGTQSGFLFYVPAPYTSKIDPLTGFVDPFVWKTIKNHESRKHFLEGFDFLHYDVKTGDFILHFKMNRNLSFQRGLPGFMPAWDIVFEKNETQFDAKGTPFIAGKRIVPVIENHRFTGRYRDLYPANELIALLEEKGIVFRDGSNILPKLLENDDSHAIDTMVALIRSVLQMRNSNAATGEDYINSPVRDLNGVCFDSRFQNPEWPMDADANGAYHIALKGQLLLNHLKESKDLKLQNGISNQDWLAYIQELRN

SEQ ID NO: 155 - protein, 1307 aa, Artificial Sequence
  SYNTHETIC
MTQFEGFTNLYQVSKTLRFELIPQGKTLKHIQEQGFIEEDKARNDHYKELKPIIDRIYKTYADQCLQLVQLDWENLSAAIDSYRKEKTEETRNALIEEQATYRNAIHDYFIGRTDNLTDAINKRHAEIYKGLFKAELFNGKVLKQLGTVTTTEHENALLRSFDKFTTYFSGFYENRKNVFSAEDISTAIPHRIVQDNFPKFKENCHIFTRLITAVPSLREHFENVKKAIGIFVSTSIEEVFSFPFYNQLLTQTQIDLYNQLLGGISREAGTEKIKGLNEVLNLAIQKNDETAHIIASLPHRFIPLFKQILSDRNTLSFILEEFKSDEEVIQSFCKYKTLLRNENVLETAEALFNELNSIDLTHIFISHKKLETISSALCDHWDTLRNALYERRISELTGKITKSAKEKVQRSLKHEDINLQEIISAAGKELSEAFKQKTSEILSHAHAALDQPLPTTLKKQEEKEILKSQLDSLLGLYHLLDWFAVDESNEVDPEFSARLTGIKLEMEPSLSFYNKARNYATKKPYSVEKFKLNFQMPTLASGWDVNKEKNNGAILFVKNGLYYLGIMPKQKGRGKALSFEPTEKTSEGFDKMYYDYFPDAAKMIPKCSTQLKAVTAHFQTHTTPILLSNNFIEPLEITKEIYDLNNPEKEPKKFQTAYAKKTGDQKGYREALCKWIDFTRDFLSKYTKTTSIDLSSLRPSSQYKDLGEYYAELNPLLYHISFQRIAEKEIMDAVETGKLYLFQIYNKDFAKGHHGKPNLHTLYWTGLFSPENLAKTSIKLNGQAELFYRPKSRMKRMAHRLGEKMLNKKLKDQKTPIPDTLYQELYDYVNHRLSHDLSDEARALLPNVITKEVSHEIIKDRRFTSDKFFFHVPITLNYQAANSPSKFNQRVNAYLKEHPETPIIGIDRGERNLIYITVIDSTGKILEQRSLNTIQQFDYQKKLDNREKERVAARQAWSVVGTIKDLKQGYLSQVIHEIVDLMIHYQAVVVLENLNFGFKSKRTGIAEKAVYQQFEKMLIDKLNCLVLKDYPAEKVGGVLNPYQLTDQFTSFAKMGTQSGFLFYVPAPYTSKIDPLTGFVDPFVWKTIKNHESRKHFLEGFDFLHYDVKTGDFILHFKMNRNLSFQRGLPGFMPAWDIVFEKNETQFDAKGTPFIAGKRIVPVIENHRFTGRYRDLYPANELIALLEEKGIVFRDGSNILPKLLENDDSHAIDTMVALIRSVLQMRNSNAATGEDYINSPVRDLNGVCFDSRFQNPEWPMDADANGAYHIALKGQLLLNHLKESKDLKLQNGISNQDWLAYIQELRN

SEQ ID NO: 156 - protein, 1307 aa, Artificial Sequence
  SYNTHETIC
MTQFEGFTNLYQVSKTLRFELIPQGKTLKHIQEQGFIEEDKARNDHYKELKPIIDRIYKTYADQCLQLVQLDWENLSAAIDSYRKEKTEETRNALIEEQATYRNAIHDYFIGRTDNLTDAINKRHAEIYKGLFKAELFNGKVLKQLGTVTTTEHENALLRSFDKFTTYFSGFYENRKNVFSAEDISTAIPHRIVQDNFPKFKENCHIFTRLITAVPSLREHFENVKKAIGIFVSTSIEEVFSFPFYNQLLTQTQIDLYNQLLGGISREAGTEKIKGLNEVLNLAIQKNDETAHIIASLPHRFIPLFKQILSDRNTLSFILEEFKSDEEVIQSFCKYKTLLRNENVLETAEALFNELNSIDLTHIFISHKKLETISSALCDHWDTLRNALYERRISELTGKITKSAKEKVQRSLKHEDINLQEIISAAGKELSEAFKQKTSEILSHAHAALDQPLPTTLKKQEEKEILKSQLDSLLGLYHLLDWFAVDESNEVDPEFSARLTGIKLEMEPSLSFYNKARNYATKKPYSVEKFKLNFQMPTLASGWDVNKEKNNGAILFVKNGLYYLGIMPKQKGRMKALSFEPTEKTSEGFDKMYYDYFPDAAKMIPKCSTQLKAVTAHFQTHTTPILLSNNFIEPLEITKEIYDLNNPEKEPKKFQTAYAKKTGDQKGYREALCKWIDFTRDFLSKYTKTTSIDLSSLRPSSQYKDLGEYYAELNPLLYHISFQRIAEKEIMDAVETGKLYLFQIYNKDFAKGHHGKPNLHTLYWTGLFSPENLAKTSIKLNGQAELFYRPKSRMKRMAHRLGEKMLNKKLKDQKTPIPDTLYQELYDYVNHRLSHDLSDEARALLPNVITKEVSHEIIKDRRFTSDKFFFHVPITLNYQAANSPSKFNQRVNAYLKEHPETPIIGIDRGERNLIYITVIDSTGKILEQRSLNTIQQFDYQKKLDNREKERVAARQAWSVVGTIKDLKQGYLSQVIHEIVDLMIHYQAVVVLENLNFGFKSKRTGIAEKAVYQQFEKMLIDKLNCLVLKDYPAEKVGGVLNPYQLTDQFTSFAKMGTQSGFLFYVPAPYTSKIDPLTGFVDPFVWKTIKNHESRKHFLEGFDFLHYDVKTGDFILHFKMNRNLSFQRGLPGFMPAWDIVFEKNETQFDAKGTPFIAGKRIVPVIENHRFTGRYRDLYPANELIALLEEKGIVFRDGSNILPKLLENDDSHAIDTMVALIRSVLQMRNSNAATGEDYINSPVRDLNGVCFDSRFQNPEWPMDADANGAYHIALKGQLLLNHLKESKDLKLQNGISNQDWLAYIQELRN

SEQ ID NO: 157 - protein, 1307 aa, Artificial Sequence
  SYNTHETIC
MTQFEGFTNLYQVSKTLRFELIPQGKTLKHIQEQGFIEEDKARNDHYKELKPIIDRIYKTYADQCLQLVQLDWENLSAAIDSYRKEKTEETRNALIEEQATYRNAIHDYFIGRTDNLTDAINKRHAEIYKGLFKAELFNGKVLKQLGTVTTTEHENALLRSFDKFTTYFSGFYENRKNVFSAEDISTAIPHRIVQDNFPKFKENCHIFTRLITAVPSLREHFENVKKAIGIFVSTSIEEVFSFPFYNQLLTQTQIDLYNQLLGGISREAGTEKIKGLNEVLNLAIQKNDETAHIIASLPHRFIPLFKQILSDRNTLSFILEEFKSDEEVIQSFCKYKTLLRNENVLETAEALFNELNSIDLTHIFISHKKLETISSALCDHWDTLRNALYERRISELTGKITKSAKEKVQRSLKHEDINLQEIISAAGKELSEAFKQKTSEILSHAHAALDQPLPTTLKKQEEKEILKSQLDSLLGLYHLLDWFAVDESNEVDPEFSARLTGIKLEMEPSLSFYNKARNYATKKPYSVEKFKLNFQMPTLASGWDVNKEKNNGAILFVKNGLYYLGIMPKQKGRYCALSFEPTEKTSEGFDKMYYDYFPDAAKMIPKCSTQLKAVTAHFQTHTTPILLSNNFIEPLEITKEIYDLNNPEKEPKKFQTAYAKKTGDQKGYREALCKWIDFTRDFLSKYTKTTSIDLSSLRPSSQYKDLGEYYAELNPLLYHISFQRIAEKEIMDAVETGKLYLFQIYNKDFAKGHHGKPNLHTLYWTGLFSPENLAKTSIKLNGQAELFYRPKSRMKRMAHRLGEKMLNKKLKDQKTPIPDTLYQELYDYVNHRLSHDLSDEARALLPNVITKEVSHEIIKDRRFTSDKFFFHVPITLNYQAANSPSKFNQRVNAYLKEHPETPIIGIDRGERNLIYITVIDSTGKILEQRSLNTIQQFDYQKKLDNREKERVAARQAWSVVGTIKDLKQGYLSQVIHEIVDLMIHYQAVVVLENLNFGFKSKRTGIAEKAVYQQFEKMLIDKLNCLVLKDYPAEKVGGVLNPYQLTDQFTSFAKMGTQSGFLFYVPAPYTSKIDPLTGFVDPFVWKTIKNHESRKHFLEGFDFLHYDVKTGDFILHFKMNRNLSFQRGLPGFMPAWDIVFEKNETQFDAKGTPFIAGKRIVPVIENHRFTGRYRDLYPANELIALLEEKGIVFRDGSNILPKLLENDDSHAIDTMVALIRSVLQMRNSNAATGEDYINSPVRDLNGVCFDSRFQNPEWPMDADANGAYHIALKGQLLLNHLKESKDLKLQNGISNQDWLAYIQELRN

SEQ ID NO: 158 - protein, 1307 aa, Artificial Sequence
  SYNTHETIC
MTQFEGFTNLYQVSKTLRFELIPQGKTLKHIQEQGFIEEDKARNDHYKELKPIIDRIYKTYADQCLQLVQLDWENLSAAIDSYRKEKTEETRNALIEEQATYRNAIHDYFIGRTDNLTDAINKRHAEIYKGLFKAELFNGKVLKQLGTVTTTEHENALLRSFDKFTTYFSGFYENRKNVFSAEDISTAIPHRIVQDNFPKFKENCHIFTRLITAVPSLREHFENVKKAIGIFVSTSIEEVFSFPFYNQLLTQTQIDLYNQLLGGISREAGTEKIKGLNEVLNLAIQKNDETAHIIASLPHRFIPLFKQILSDRNTLSFILEEFKSDEEVIQSFCKYKTLLRNENVLETAEALFNELNSIDLTHIFISHKKLETISSALCDHWDTLRNALYERRISELTGKITKSAKEKVQRSLKHEDINLQEIISAAGKELSEAFKQKTSEILSHAHAALDQPLPTTLKKQEEKEILKSQLDSLLGLYHLLDWFAVDESNEVDPEFSARLTGIKLEMEPSLSFYNKARNYATKKPYSVEKFKLNFQMPTLASGWDVNKEKNNGAILFVKNGLYYLGIMPKQKGRYKALTFEPTEKTSEGFDKMYYDYFPDAAKMIPKCSTQLKAVTAHFQTHTTPILLSNNFIEPLEITKEIYDLNNPEKEPKKFQTAYAKKTGDQKGYREALCKWIDFTRDFLSKYTKTTSIDLSSLRPSSQYKDLGEYYAELNPLLYHISFQRIAEKEIMDAVETGKLYLFQIYNKDFAKGHHGKPNLHTLYWTGLFSPENLAKTSIKLNGQAELFYRPKSRMKRMAHRLGEKMLNKKLKDQKTPIPDTLYQELYDYVNHRLSHDLSDEARALLPNVITKEVSHEIIKDRRFTSDKFFFHVPITLNYQAANSPSKFNQRVNAYLKEHPETPIIGIDRGERNLIYITVIDSTGKILEQRSLNTIQQFDYQKKLDNREKERVAARQAWSVVGTIKDLKQGYLSQVIHEIVDLMIHYQAVVVLENLNFGFKSKRTGIAEKAVYQQFEKMLIDKLNCLVLKDYPAEKVGGVLNPYQLTDQFTSFAKMGTQSGFLFYVPAPYTSKIDPLTGFVDPFVWKTIKNHESRKHFLEGFDFLHYDVKTGDFILHFKMNRNLSFQRGLPGFMPAWDIVFEKNETQFDAKGTPFIAGKRIVPVIENHRFTGRYRDLYPANELIALLEEKGIVFRDGSNILPKLLENDDSHAIDTMVALIRSVLQMRNSNAATGEDYINSPVRDLNGVCFDSRFQNPEWPMDADANGAYHIALKGQLLLNHLKESKDLKLQNGISNQDWLAYIQELRN

SEQ ID NO: 159 - protein, 1307 aa, Artificial Sequence
  SYNTHETIC
MTQFEGFTNLYQVSKTLRFELIPQGKTLKHIQEQGFIEEDKARNDHYKELKPIIDRIYKTYADQCLQLVQLDWENLSAAIDSYRKEKTEETRNALIEEQATYRNAIHDYFIGRTDNLTDAINKRHAEIYKGLFKAELFNGKVLKQLGTVTTTEHENALLRSFDKFTTYFSGFYENRKNVFSAEDISTAIPHRIVQDNFPKFKENCHIFTRLITAVPSLREHFENVKKAIGIFVSTSIEEVFSFPFYNQLLTQTQIDLYNQLLGGISREAGTEKIKGLNEVLNLAIQKNDETAHIIASLPHRFIPLFKQILSDRNTLSFILEEFKSDEEVIQSFCKYKTLLRNENVLETAEALFNELNSIDLTHIFISHKKLETISSALCDHWDTLRNALYERRISELTGKITKSAKEKVQRSLKHEDINLQEIISAAGKELSEAFKQKTSEILSHAHAALDQPLPTTLKKQEEKEILKSQLDSLLGLYHLLDWFAVDESNEVDPEFSARLTGIKLEMEPSLSFYNKARNYATKKPYSVEKFKLNFQMPTLASGWDVNKEKNNGAILFVKNGLYYLGIMPKQKGRYKALVFEPTEKTSEGFDKMYYDYFPDAAKMIPKCSTQLKAVTAHFQTHTTPILLSNNFIEPLEITKEIYDLNNPEKEPKKFQTAYAKKTGDQKGYREALCKWIDFTRDFLSKYTKTTSIDLSSLRPSSQYKDLGEYYAELNPLLYHISFQRIAEKEIMDAVETGKLYLFQIYNKDFAKGHHGKPNLHTLYWTGLFSPENLAKTSIKLNGQAELFYRPKSRMKRMAHRLGEKMLNKKLKDQKTPIPDTLYQELYDYVNHRLSHDLSDEARALLPNVITKEVSHEIIKDRRFTSDKFFFHVPITLNYQAANSPSKFNQRVNAYLKEHPETPIIGIDRGERNLIYITVIDSTGKILEQRSLNTIQQFDYQKKLDNREKERVAARQAWSVVGTIKDLKQGYLSQVIHEIVDLMIHYQAVVVLENLNFGFKSKRTGIAEKAVYQQFEKMLIDKLNCLVLKDYPAEKVGGVLNPYQLTDQFTSFAKMGTQSGFLFYVPAPYTSKIDPLTGFVDPFVWKTIKNHESRKHFLEGFDFLHYDVKTGDFILHFKMNRNLSFQRGLPGFMPAWDIVFEKNETQFDAKGTPFIAGKRIVPVIENHRFTGRYRDLYPANELIALLEEKGIVFRDGSNILPKLLENDDSHAIDTMVALIRSVLQMRNSNAATGEDYINSPVRDLNGVCFDSRFQNPEWPMDADANGAYHIALKGQLLLNHLKESKDLKLQNGISNQDWLAYIQELRN

SEQ ID NO: 160 - protein, 1307 aa, Artificial Sequence
  SYNTHETIC
MTQFEGFTNLYQVSKTLRFELIPQGKTLKHIQEQGFIEEDKARNDHYKELKPIIDRIYKTYADQCLQLVQLDWENLSAAIDSYRKEKTEETRNALIEEQATYRNAIHDYFIGRTDNLTDAINKRHAEIYKGLFKAELFNGKVLKQLGTVTTTEHENALLRSFDKFTTYFSGFYENRKNVFSAEDISTAIPHRIVQDNFPKFKENCHIFTRLITAVPSLREHFENVKKAIGIFVSTSIEEVFSFPFYNQLLTQTQIDLYNQLLGGISREAGTEKIKGLNEVLNLAIQKNDETAHIIASLPHRFIPLFKQILSDRNTLSFILEEFKSDEEVIQSFCKYKTLLRNENVLETAEALFNELNSIDLTHIFISHKKLETISSALCDHWDTLRNALYERRISELTGKITKSAKEKVQRSLKHEDINLQEIISAAGKELSEAFKQKTSEILSHAHAALDQPLPTTLKKQEEKEILKSQLDSLLGLYHLLDWFAVDESNEVDPEFSARLTGIKLEMEPSLSFYNKARNYATKKPYSVEKFKLNFQMPTLASGWDVNKEKNNGAILFVKNGLYYLGIMPKQKGRYKALSFEPIEKTSEGFDKMYYDYFPDAAKMIPKCSTQLKAVTAHFQTHTTPILLSNNFIEPLEITKEIYDLNNPEKEPKKFQTAYAKKTGDQKGYREALCKWIDFTRDFLSKYTKTTSIDLSSLRPSSQYKDLGEYYAELNPLLYHISFQRIAEKEIMDAVETGKLYLFQIYNKDFAKGHHGKPNLHTLYWTGLFSPENLAKTSIKLNGQAELFYRPKSRMKRMAHRLGEKMLNKKLKDQKTPIPDTLYQELYDYVNHRLSHDLSDEARALLPNVITKEVSHEIIKDRRFTSDKFFFHVPITLNYQAANSPSKFNQRVNAYLKEHPETPIIGIDRGERNLIYITVIDSTGKILEQRSLNTIQQFDYQKKLDNREKERVAARQAWSVVGTIKDLKQGYLSQVIHEIVDLMIHYQAVVVLENLNFGFKSKRTGIAEKAVYQQFEKMLIDKLNCLVLKDYPAEKVGGVLNPYQLTDQFTSFAKMGTQSGFLFYVPAPYTSKIDPLTGFVDPFVWKTIKNHESRKHFLEGFDFLHYDVKTGDFILHFKMNRNLSFQRGLPGFMPAWDIVFEKNETQFDAKGTPFIAGKRIVPVIENHRFTGRYRDLYPANELIALLEEKGIVFRDGSNILPKLLENDDSHAIDTMVALIRSVLQMRNSNAATGEDYINSPVRDLNGVCFDSRFQNPEWPMDADANGAYHIALKGQLLLNHLKESKDLKLQNGISNQDWLAYIQELRN

SEQ ID NO: 161 - protein, 1307 aa, Artificial Sequence
  SYNTHETIC
MTQFEGFTNLYQVSKTLRFELIPQGKTLKHIQEQGFIEEDKARNDHYKELKPIIDRIYKTYADQCLQLVQLDWENLSAAIDSYRKEKTEETRNALIEEQATYRNAIHDYFIGRTDNLTDAINKRHAEIYKGLFKAELFNGKVLKQLGTVTTTEHENALLRSFDKFTTYFSGFYENRKNVFSAEDISTAIPHRIVQDNFPKFKENCHIFTRLITAVPSLREHFENVKKAIGIFVSTSIEEVFSFPFYNQLLTQTQIDLYNQLLGGISREAGTEKIKGLNEVLNLAIQKNDETAHIIASLPHRFIPLFKQILSDRNTLSFILEEFKSDEEVIQSFCKYKTLLRNENVLETAEALFNELNSIDLTHIFISHKKLETISSALCDHWDTLRNALYERRISELTGKITKSAKEKVQRSLKHEDINLQEIISAAGKELSEAFKQKTSEILSHAHAALDQPLPTTLKKQEEKEILKSQLDSLLGLYHLLDWFAVDESNEVDPEFSARLTGIKLEMEPSLSFYNKARNYATKKPYSVEKFKLNFQMPTLASGWDVNKEKNNGAILFVKNGLYYLGIMPKQKGRYKALSFEPTHKTSEGFDKMYYDYFPDAAKMIPKCSTQLKAVTAHFQTHTTPILLSNNFIEPLEITKEIYDLNNPEKEPKKFQTAYAKKTGDQKGYREALCKWIDFTRDFLSKYTKTTSIDLSSLRPSSQYKDLGEYYAELNPLLYHISFQRIAEKEIMDAVETGKLYLFQIYNKDFAKGHHGKPNLHTLYWTGLFSPENLAKTSIKLNGQAELFYRPKSRMKRMAHRLGEKMLNKKLKDQKTPIPDTLYQELYDYVNHRLSHDLSDEARALLPNVITKEVSHEIIKDRRFTSDKFFFHVPITLNYQAANSPSKFNQRVNAYLKEHPETPIIGIDRGERNLIYITVIDSTGKILEQRSLNTIQQFDYQKKLDNREKERVAARQAWSVVGTIKDLKQGYLSQVIHEIVDLMIHYQAVVVLENLNFGFKSKRTGIAEKAVYQQFEKMLIDKLNCLVLKDYPAEKVGGVLNPYQLTDQFTSFAKMGTQSGFLFYVPAPYTSKIDPLTGFVDPFVWKTIKNHESRKHFLEGFDFLHYDVKTGDFILHFKMNRNLSFQRGLPGFMPAWDIVFEKNETQFDAKGTPFIAGKRIVPVIENHRFTGRYRDLYPANELIALLEEKGIVFRDGSNILPKLLENDDSHAIDTMVALIRSVLQMRNSNAATGEDYINSPVRDLNGVCFDSRFQNPEWPMDADANGAYHIALKGQLLLNHLKESKDLKLQNGISNQDWLAYIQELRN

SEQ ID NO: 162 - protein, 1307 aa, Artificial Sequence
  SYNTHETIC
MTQFEGFTNLYQVSKTLRFELIPQGKTLKHIQEQGFIEEDKARNDHYKELKPIIDRIYKTYADQCLQLVQLDWENLSAAIDSYRKEKTEETRNALIEEQATYRNAIHDYFIGRTDNLTDAINKRHAEIYKGLFKAELFNGKVLKQLGTVTTTEHENALLRSFDKFTTYFSGFYENRKNVFSAEDISTAIPHRIVQDNFPKFKENCHIFTRLITAVPSLREHFENVKKAIGIFVSTSIEEVFSFPFYNQLLTQTQIDLYNQLLGGISREAGTEKIKGLNEVLNLAIQKNDETAHIIASLPHRFIPLFKQILSDRNTLSFILEEFKSDEEVIQSFCKYKTLLRNENVLETAEALFNELNSIDLTHIFISHKKLETISSALCDHWDTLRNALYERRISELTGKITKSAKEKVQRSLKHEDINLQEIISAAGKELSEAFKQKTSEILSHAHAALDQPLPTTLKKQEEKEILKSQLDSLLGLYHLLDWFAVDESNEVDPEFSARLTGIKLEMEPSLSFYNKARNYATKKPYSVEKFKLNFQMPTLASGWDVNKEKNNGAILFVKNGLYYLGIMPKQKGRYKALSFEPTVKTSEGFDKMYYDYFPDAAKMIPKCSTQLKAVTAHFQTHTTPILLSNNFIEPLEITKEIYDLNNPEKEPKKFQTAYAKKTGDQKGYREALCKWIDFTRDFLSKYTKTTSIDLSSLRPSSQYKDLGEYYAELNPLLYHISFQRIAEKEIMDAVETGKLYLFQIYNKDFAKGHHGKPNLHTLYWTGLFSPENLAKTSIKLNGQAELFYRPKSRMKRMAHRLGEKMLNKKLKDQKTPIPDTLYQELYDYVNHRLSHDLSDEARALLPNVITKEVSHEIIKDRRFTSDKFFFHVPITLNYQAANSPSKFNQRVNAYLKEHPETPIIGIDRGERNLIYITVIDSTGKILEQRSLNTIQQFDYQKKLDNREKERVAARQAWSVVGTIKDLKQGYLSQVIHEIVDLMIHYQAVVVLENLNFGFKSKRTGIAEKAVYQQFEKMLIDKLNCLVLKDYPAEKVGGVLNPYQLTDQFTSFAKMGTQSGFLFYVPAPYTSKIDPLTGFVDPFVWKTIKNHESRKHFLEGFDFLHYDVKTGDFILHFKMNRNLSFQRGLPGFMPAWDIVFEKNETQFDAKGTPFIAGKRIVPVIENHRFTGRYRDLYPANELIALLEEKGIVFRDGSNILPKLLENDDSHAIDTMVALIRSVLQMRNSNAATGEDYINSPVRDLNGVCFDSRFQNPEWPMDADANGAYHIALKGQLLLNHLKESKDLKLQNGISNQDWLAYIQELRN

SEQ ID NO: 163 - protein, 1307 aa, Artificial Sequence
  SYNTHETIC
MTQFEGFTNLYQVSKTLRFELIPQGKTLKHIQEQGFIEEDKARNDHYKELKPIIDRIYKTYADQCLQLVQLDWENLSAAIDSYRKEKTEETRNALIEEQATYRNAIHDYFIGRTDNLTDAINKRHAEIYKGLFKAELFNGKVLKQLGTVTTTEHENALLRSFDKFTTYFSGFYENRKNVFSAEDISTAIPHRIVQDNFPKFKENCHIFTRLITAVPSLREHFENVKKAIGIFVSTSIEEVFSFPFYNQLLTQTQIDLYNQLLGGISREAGTEKIKGLNEVLNLAIQKNDETAHIIASLPHRFIPLFKQILSDRNTLSFILEEFKSDEEVIQSFCKYKTLLRNENVLETAEALFNELNSIDLTHIFISHKKLETISSALCDHWDTLRNALYERRISELTGKITKSAKEKVQRSLKHEDINLQEIISAAGKELSEAFKQKTSEILSHAHAALDQPLPTTLKKQEEKEILKSQLDSLLGLYHLLDWFAVDESNEVDPEFSARLTGIKLEMEPSLSFYNKARNYATKKPYSVEKFKLNFQMPTLASGWDVNKEKNNGAILFVKNGLYYLGIMPKQKGRYKALSFEPTERTSEGFDKMYYDYFPDAAKMIPKCSTQLKAVTAHFQTHTTPILLSNNFIEPLEITKEIYDLNNPEKEPKKFQTAYAKKTGDQKGYREALCKWIDFTRDFLSKYTKTTSIDLSSLRPSSQYKDLGEYYAELNPLLYHISFQRIAEKEIMDAVETGKLYLFQIYNKDFAKGHHGKPNLHTLYWTGLFSPENLAKTSIKLNGQAELFYRPKSRMKRMAHRLGEKMLNKKLKDQKTPIPDTLYQELYDYVNHRLSHDLSDEARALLPNVITKEVSHEIIKDRRFTSDKFFFHVPITLNYQAANSPSKFNQRVNAYLKEHPETPIIGIDRGERNLIYITVIDSTGKILEQRSLNTIQQFDYQKKLDNREKERVAARQAWSVVGTIKDLKQGYLSQVIHEIVDLMIHYQAVVVLENLNFGFKSKRTGIAEKAVYQQFEKMLIDKLNCLVLKDYPAEKVGGVLNPYQLTDQFTSFAKMGTQSGFLFYVPAPYTSKIDPLTGFVDPFVWKTIKNHESRKHFLEGFDFLHYDVKTGDFILHFKMNRNLSFQRGLPGFMPAWDIVFEKNETQFDAKGTPFIAGKRIVPVIENHRFTGRYRDLYPANELIALLEEKGIVFRDGSNILPKLLENDDSHAIDTMVALIRSVLQMRNSNAATGEDYINSPVRDLNGVCFDSRFQNPEWPMDADANGAYHIALKGQLLLNHLKESKDLKLQNGISNQDWLAYIQELRN

SEQ ID NO: 164 - protein, 1307 aa, Artificial Sequence
  SYNTHETIC
MTQFEGFTNLYQVSKTLRFELIPQGKTLKHIQEQGFIEEDKARNDHYKELKPIIDRIYKTYADQCLQLVQLDWENLSAAIDSYRKEKTEETRNALIEEQATYRNAIHDYFIGRTDNLTDAINKRHAEIYKGLFKAELFNGKVLKQLGTVTTTEHENALLRSFDKFTTYFSGFYENRKNVFSAEDISTAIPHRIVQDNFPKFKENCHIFTRLITAVPSLREHFENVKKAIGIFVSTSIEEVFSFPFYNQLLTQTQIDLYNQLLGGISREAGTEKIKGLNEVLNLAIQKNDETAHIIASLPHRFIPLFKQILSDRNTLSFILEEFKSDEEVIQSFCKYKTLLRNENVLETAEALFNELNSIDLTHIFISHKKLETISSALCDHWDTLRNALYERRISELTGKITKSAKEKVQRSLKHEDINLQEIISAAGKELSEAFKQKTSEILSHAHAALDQPLPTTLKKQEEKEILKSQLDSLLGLYHLLDWFAVDESNEVDPEFSARLTGIKLEMEPSLSFYNKARNYATKKPYSVEKFKLNFQMPTLASGWDVNKEKNNGAILFVKNGLYYLGIMPKQKGRYKALSFEPTEFTSEGFDKMYYDYFPDAAKMIPKCSTQLKAVTAHFQTHTTPILLSNNFIEPLEITKEIYDLNNPEKEPKKFQTAYAKKTGDQKGYREALCKWIDFTRDFLSKYTKTTSIDLSSLRPSSQYKDLGEYYAELNPLLYHISFQRIAEKEIMDAVETGKLYLFQIYNKDFAKGHHGKPNLHTLYWTGLFSPENLAKTSIKLNGQAELFYRPKSRMKRMAHRLGEKMLNKKLKDQKTPIPDTLYQELYDYVNHRLSHDLSDEARALLPNVITKEVSHEIIKDRRFTSDKFFFHVPITLNYQAANSPSKFNQRVNAYLKEHPETPIIGIDRGERNLIYITVIDSTGKILEQRSLNTIQQFDYQKKLDNREKERVAARQAWSVVGTIKDLKQGYLSQVIHEIVDLMIHYQAVVVLENLNFGFKSKRTGIAEKAVYQQFEKMLIDKLNCLVLKDYPAEKVGGVLNPYQLTDQFTSFAKMGTQSGFLFYVPAPYTSKIDPLTGFVDPFVWKTIKNHESRKHFLEGFDFLHYDVKTGDFILHFKMNRNLSFQRGLPGFMPAWDIVFEKNETQFDAKGTPFIAGKRIVPVIENHRFTGRYRDLYPANELIALLEEKGIVFRDGSNILPKLLENDDSHAIDTMVALIRSVLQMRNSNAATGEDYINSPVRDLNGVCFDSRFQNPEWPMDADANGAYHIALKGQLLLNHLKESKDLKLQNGISNQDWLAYIQELRN

SEQ ID NO: 165 - protein, 1307 aa, Artificial Sequence
  SYNTHETIC
MTQFEGFTNLYQVSKTLRFELIPQGKTLKHIQEQGFIEEDKARNDHYKELKPIIDRIYKTYADQCLQLVQLDWENLSAAIDSYRKEKTEETRNALIEEQATYRNAIHDYFIGRTDNLTDAINKRHAEIYKGLFKAELFNGKVLKQLGTVTTTEHENALLRSFDKFTTYFSGFYENRKNVFSAEDISTAIPHRIVQDNFPKFKENCHIFTRLITAVPSLREHFENVKKAIGIFVSTSIEEVFSFPFYNQLLTQTQIDLYNQLLGGISREAGTEKIKGLNEVLNLAIQKNDETAHIIASLPHRFIPLFKQILSDRNTLSFILEEFKSDEEVIQSFCKYKTLLRNENVLETAEALFNELNSIDLTHIFISHKKLETISSALCDHWDTLRNALYERRISELTGKITKSAKEKVQRSLKHEDINLQEIISAAGKELSEAFKQKTSEILSHAHAALDQPLPTTLKKQEEKEILKSQLDSLLGLYHLLDWFAVDESNEVDPEFSARLTGIKLEMEPSLSFYNKARNYATKKPYSVEKFKLNFQMPTLASGWDVNKEKNNGAILFVKNGLYYLGIMPKQKGRYKALSFEPTEKTSEGFDKMYYEYFPDAAKMIPKCSTQLKAVTAHFQTHTTPILLSNNFIEPLEITKEIYDLNNPEKEPKKFQTAYAKKTGDQKGYREALCKWIDFTRDFLSKYTKTTSIDLSSLRPSSQYKDLGEYYAELNPLLYHISFQRIAEKEIMDAVETGKLYLFQIYNKDFAKGHHGKPNLHTLYWTGLFSPENLAKTSIKLNGQAELFYRPKSRMKRMAHRLGEKMLNKKLKDQKTPIPDTLYQELYDYVNHRLSHDLSDEARALLPNVITKEVSHEIIKDRRFTSDKFFFHVPITLNYQAANSPSKFNQRVNAYLKEHPETPIIGIDRGERNLIYITVIDSTGKILEQRSLNTIQQFDYQKKLDNREKERVAARQAWSVVGTIKDLKQGYLSQVIHEIVDLMIHYQAVVVLENLNFGFKSKRTGIAEKAVYQQFEKMLIDKLNCLVLKDYPAEKVGGVLNPYQLTDQFTSFAKMGTQSGFLFYVPAPYTSKIDPLTGFVDPFVWKTIKNHESRKHFLEGFDFLHYDVKTGDFILHFKMNRNLSFQRGLPGFMPAWDIVFEKNETQFDAKGTPFIAGKRIVPVIENHRFTGRYRDLYPANELIALLEEKGIVFRDGSNILPKLLENDDSHAIDTMVALIRSVLQMRNSNAATGEDYINSPVRDLNGVCFDSRFQNPEWPMDADANGAYHIALKGQLLLNHLKESKDLKLQNGISNQDWLAYIQELRN

SEQ ID NO: 166 - protein, 1307 aa, Artificial Sequence
  SYNTHETIC
MTQFEGFTNLYQVSKTLRFELIPQGKTLKHIQEQGFIEEDKARNDHYKELKPIIDRIYKTYADQCLQLVQLDWENLSAAIDSYRKEKTEETRNALIEEQATYRNAIHDYFIGRTDNLTDAINKRHAEIYKGLFKAELFNGKVLKQLGTVTTTEHENALLRSFDKFTTYFSGFYENRKNVFSAEDISTAIPHRIVQDNFPKFKENCHIFTRLITAVPSLREHFENVKKAIGIFVSTSIEEVFSFPFYNQLLTQTQIDLYNQLLGGISREAGTEKIKGLNEVLNLAIQKNDETAHIIASLPHRFIPLFKQILSDRNTLSFILEEFKSDEEVIQSFCKYKTLLRNENVLETAEALFNELNSIDLTHIFISHKKLETISSALCDHWDTLRNALYERRISELTGKITKSAKEKVQRSLKHEDINLQEIISAAGKELSEAFKQKTSEILSHAHAALDQPLPTTLKKQEEKEILKSQLDSLLGLYHLLDWFAVDESNEVDPEFSARLTGIKLEMEPSLSFYNKARNYATKKPYSVEKFKLNFQMPTLASGWDVNKEKNNGAILFVKNGLYYLGIMPKQKGRYKALSFEPTEKTSEGFDKMYYDYFGDAAKMIPKCSTQLKAVTAHFQTHTTPILLSNNFIEPLEITKEIYDLNNPEKEPKKFQTAYAKKTGDQKGYREALCKWIDFTRDFLSKYTKTTSIDLSSLRPSSQYKDLGEYYAELNPLLYHISFQRIAEKEIMDAVETGKLYLFQIYNKDFAKGHHGKPNLHTLYWTGLFSPENLAKTSIKLNGQAELFYRPKSRMKRMAHRLGEKMLNKKLKDQKTPIPDTLYQELYDYVNHRLSHDLSDEARALLPNVITKEVSHEIIKDRRFTSDKFFFHVPITLNYQAANSPSKFNQRVNAYLKEHPETPIIGIDRGERNLIYITVIDSTGKILEQRSLNTIQQFDYQKKLDNREKERVAARQAWSVVGTIKDLKQGYLSQVIHEIVDLMIHYQAVVVLENLNFGFKSKRTGIAEKAVYQQFEKMLIDKLNCLVLKDYPAEKVGGVLNPYQLTDQFTSFAKMGTQSGFLFYVPAPYTSKIDPLTGFVDPFVWKTIKNHESRKHFLEGFDFLHYDVKTGDFILHFKMNRNLSFQRGLPGFMPAWDIVFEKNETQFDAKGTPFIAGKRIVPVIENHRFTGRYRDLYPANELIALLEEKGIVFRDGSNILPKLLENDDSHAIDTMVALIRSVLQMRNSNAATGEDYINSPVRDLNGVCFDSRFQNPEWPMDADANGAYHIALKGQLLLNHLKESKDLKLQNGISNQDWLAYIQELRN

SEQ ID NO: 167 - protein, 1307 aa, Artificial Sequence
  SYNTHETIC
MTQFEGFTNLYQVSKTLRFELIPQGKTLKHIQEQGFIEEDKARNDHYKELKPIIDRIYKTYADQCLQLVQLDWENLSAAIDSYRKEKTEETRNALIEEQATYRNAIHDYFIGRTDNLTDAINKRHAEIYKGLFKAELFNGKVLKQLGTVTTTEHENALLRSFDKFTTYFSGFYENRKNVFSAEDISTAIPHRIVQDNFPKFKENCHIFTRLITAVPSLREHFENVKKAIGIFVSTSIEEVFSFPFYNQLLTQTQIDLYNQLLGGISREAGTEKIKGLNEVLNLAIQKNDETAHIIASLPHRFIPLFKQILSDRNTLSFILEEFKSDEEVIQSFCKYKTLLRNENVLETAEALFNELNSIDLTHIFISHKKLETISSALCDHWDTLRNALYERRISELTGKITKSAKEKVQRSLKHEDINLQEIISAAGKELSEAFKQKTSEILSHAHAALDQPLPTTLKKQEEKEILKSQLDSLLGLYHLLDWFAVDESNEVDPEFSARLTGIKLEMEPSLSFYNKARNYATKKPYSVEKFKLNFQMPTLASGWDVNKEKNNGAILFVKNGLYYLGIMPKQKGRYKALSFEPTEKTSEGFDKMYYDYFPDACKMIPKCSTQLKAVTAHFQTHTTPILLSNNFIEPLEITKEIYDLNNPEKEPKKFQTAYAKKTGDQKGYREALCKWIDFTRDFLSKYTKTTSIDLSSLRPSSQYKDLGEYYAELNPLLYHISFQRIAEKEIMDAVETGKLYLFQIYNKDFAKGHHGKPNLHTLYWTGLFSPENLAKTSIKLNGQAELFYRPKSRMKRMAHRLGEKMLNKKLKDQKTPIPDTLYQELYDYVNHRLSHDLSDEARALLPNVITKEVSHEIIKDRRFTSDKFFFHVPITLNYQAANSPSKFNQRVNAYLKEHPETPIIGIDRGERNLIYITVIDSTGKILEQRSLNTIQQFDYQKKLDNREKERVAARQAWSVVGTIKDLKQGYLSQVIHEIVDLMIHYQAVVVLENLNFGFKSKRTGIAEKAVYQQFEKMLIDKLNCLVLKDYPAEKVGGVLNPYQLTDQFTSFAKMGTQSGFLFYVPAPYTSKIDPLTGFVDPFVWKTIKNHESRKHFLEGFDFLHYDVKTGDFILHFKMNRNLSFQRGLPGFMPAWDIVFEKNETQFDAKGTPFIAGKRIVPVIENHRFTGRYRDLYPANELIALLEEKGIVFRDGSNILPKLLENDDSHAIDTMVALIRSVLQMRNSNAATGEDYINSPVRDLNGVCFDSRFQNPEWPMDADANGAYHIALKGQLLLNHLKESKDLKLQNGISNQDWLAYIQELRN

SEQ ID NO: 168 - protein, 1307 aa, Artificial Sequence
  SYNTHETIC
MTQFEGFTNLYQVSKTLRFELIPQGKTLKHIQEQGFIEEDKARNDHYKELKPIIDRIYKTYADQCLQLVQLDWENLSAAIDSYRKEKTEETRNALIEEQATYRNAIHDYFIGRTDNLTDAINKRHAEIYKGLFKAELFNGKVLKQLGTVTTTEHENALLRSFDKFTTYFSGFYENRKNVFSAEDISTAIPHRIVQDNFPKFKENCHIFTRLITAVPSLREHFENVKKAIGIFVSTSIEEVFSFPFYNQLLTQTQIDLYNQLLGGISREAGTEKIKGLNEVLNLAIQKNDETAHIIASLPHRFIPLFKQILSDRNTLSFILEEFKSDEEVIQSFCKYKTLLRNENVLETAEALFNELNSIDLTHIFISHKKLETISSALCDHWDTLRNALYERRISELTGKITKSAKEKVQRSLKHEDINLQEIISAAGKELSEAFKQKTSEILSHAHAALDQPLPTTLKKQEEKEILKSQLDSLLGLYHLLDWFAVDESNEVDPEFSARLTGIKLEMEPSLSFYNKARNYATKKPYSVEKFKLNFQMPTLASGWDVNKEKNNGAILFVKNGLYYLGIMPKQKGRYKALSFEPTEKTSEGFDKMYYDYFPDAAKMIPKCSTQMKAVTAHFQTHTTPILLSNNFIEPLEITKEIYDLNNPEKEPKKFQTAYAKKTGDQKGYREALCKWIDFTRDFLSKYTKTTSIDLSSLRPSSQYKDLGEYYAELNPLLYHISFQRIAEKEIMDAVETGKLYLFQIYNKDFAKGHHGKPNLHTLYWTGLFSPENLAKTSIKLNGQAELFYRPKSRMKRMAHRLGEKMLNKKLKDQKTPIPDTLYQELYDYVNHRLSHDLSDEARALLPNVITKEVSHEIIKDRRFTSDKFFFHVPITLNYQAANSPSKFNQRVNAYLKEHPETPIIGIDRGERNLIYITVIDSTGKILEQRSLNTIQQFDYQKKLDNREKERVAARQAWSVVGTIKDLKQGYLSQVIHEIVDLMIHYQAVVVLENLNFGFKSKRTGIAEKAVYQQFEKMLIDKLNCLVLKDYPAEKVGGVLNPYQLTDQFTSFAKMGTQSGFLFYVPAPYTSKIDPLTGFVDPFVWKTIKNHESRKHFLEGFDFLHYDVKTGDFILHFKMNRNLSFQRGLPGFMPAWDIVFEKNETQFDAKGTPFIAGKRIVPVIENHRFTGRYRDLYPANELIALLEEKGIVFRDGSNILPKLLENDDSHAIDTMVALIRSVLQMRNSNAATGEDYINSPVRDLNGVCFDSRFQNPEWPMDADANGAYHIALKGQLLLNHLKESKDLKLQNGISNQDWLAYIQELRN

SEQ ID NO: 169 - protein, 1307 aa, Artificial Sequence
  SYNTHETIC
MTQFEGFTNLYQVSKTLRFELIPQGKTLKHIQEQGFIEEDKARNDHYKELKPIIDRIYKTYADQCLQLVQLDWENLSAAIDSYRKEKTEETRNALIEEQATYRNAIHDYFIGRTDNLTDAINKRHAEIYKGLFKAELFNGKVLKQLGTVTTTEHENALLRSFDKFTTYFSGFYENRKNVFSAEDISTAIPHRIVQDNFPKFKENCHIFTRLITAVPSLREHFENVKKAIGIFVSTSIEEVFSFPFYNQLLTQTQIDLYNQLLGGISREAGTEKIKGLNEVLNLAIQKNDETAHIIASLPHRFIPLFKQILSDRNTLSFILEEFKSDEEVIQSFCKYKTLLRNENVLETAEALFNELNSIDLTHIFISHKKLETISSALCDHWDTLRNALYERRISELTGKITKSAKEKVQRSLKHEDINLQEIISAAGKELSEAFKQKTSEILSHAHAALDQPLPTTLKKQEEKEILKSQLDSLLGLYHLLDWFAVDESNEVDPEFSARLTGIKLEMEPSLSFYNKARNYATKKPYSVEKFKLNFQMPTLASGWDVNKEKNNGAILFVKNGLYYLGIMPKQKGRYKALSFEPTEKTSEGFDKMYYDYFPDAAKMIPKCSTQLKRVTAHFQTHTTPILLSNNFIEPLEITKEIYDLNNPEKEPKKFQTAYAKKTGDQKGYREALCKWIDFTRDFLSKYTKTTSIDLSSLRPSSQYKDLGEYYAELNPLLYHISFQRIAEKEIMDAVETGKLYLFQIYNKDFAKGHHGKPNLHTLYWTGLFSPENLAKTSIKLNGQAELFYRPKSRMKRMAHRLGEKMLNKKLKDQKTPIPDTLYQELYDYVNHRLSHDLSDEARALLPNVITKEVSHEIIKDRRFTSDKFFFHVPITLNYQAANSPSKFNQRVNAYLKEHPETPIIGIDRGERNLIYITVIDSTGKILEQRSLNTIQQFDYQKKLDNREKERVAARQAWSVVGTIKDLKQGYLSQVIHEIVDLMIHYQAVVVLENLNFGFKSKRTGIAEKAVYQQFEKMLIDKLNCLVLKDYPAEKVGGVLNPYQLTDQFTSFAKMGTQSGFLFYVPAPYTSKIDPLTGFVDPFVWKTIKNHESRKHFLEGFDFLHYDVKTGDFILHFKMNRNLSFQRGLPGFMPAWDIVFEKNETQFDAKGTPFIAGKRIVPVIENHRFTGRYRDLYPANELIALLEEKGIVFRDGSNILPKLLENDDSHAIDTMVALIRSVLQMRNSNAATGEDYINSPVRDLNGVCFDSRFQNPEWPMDADANGAYHIALKGQLLLNHLKESKDLKLQNGISNQDWLAYIQELRN

SEQ ID NO: 170 - protein, 1307 aa, Artificial Sequence
  SYNTHETIC
MTQFEGFTNLYQVSKTLRFELIPQGKTLKHIQEQGFIEEDKARNDHYKELKPIIDRIYKTYADQCLQLVQLDWENLSAAIDSYRKEKTEETRNALIEEQATYRNAIHDYFIGRTDNLTDAINKRHAEIYKGLFKAELFNGKVLKQLGTVTTTEHENALLRSFDKFTTYFSGFYENRKNVFSAEDISTAIPHRIVQDNFPKFKENCHIFTRLITAVPSLREHFENVKKAIGIFVSTSIEEVFSFPFYNQLLTQTQIDLYNQLLGGISREAGTEKIKGLNEVLNLAIQKNDETAHIIASLPHRFIPLFKQILSDRNTLSFILEEFKSDEEVIQSFCKYKTLLRNENVLETAEALFNELNSIDLTHIFISHKKLETISSALCDHWDTLRNALYERRISELTGKITKSAKEKVQRSLKHEDINLQEIISAAGKELSEAFKQKTSEILSHAHAALDQPLPTTLKKQEEKEILKSQLDSLLGLYHLLDWFAVDESNEVDPEFSARLTGIKLEMEPSLSFYNKARNYATKKPYSVEKFKLNFQMPTLASGWDVNKEKNNGAILFVKNGLYYLGIMPKQKGRYKALSFEPTEKTSEGFDKMYYDYFPDAAKMIPKCSTQLKIVTAHFQTHTTPILLSNNFIEPLEITKEIYDLNNPEKEPKKFQTAYAKKTGDQKGYREALCKWIDFTRDFLSKYTKTTSIDLSSLRPSSQYKDLGEYYAELNPLLYHISFQRIAEKEIMDAVETGKLYLFQIYNKDFAKGHHGKPNLHTLYWTGLFSPENLAKTSIKLNGQAELFYRPKSRMKRMAHRLGEKMLNKKLKDQKTPIPDTLYQELYDYVNHRLSHDLSDEARALLPNVITKEVSHEIIKDRRFTSDKFFFHVPITLNYQAANSPSKFNQRVNAYLKEHPETPIIGIDRGERNLIYITVIDSTGKILEQRSLNTIQQFDYQKKLDNREKERVAARQAWSVVGTIKDLKQGYLSQVIHEIVDLMIHYQAVVVLENLNFGFKSKRTGIAEKAVYQQFEKMLIDKLNCLVLKDYPAEKVGGVLNPYQLTDQFTSFAKMGTQSGFLFYVPAPYTSKIDPLTGFVDPFVWKTIKNHESRKHFLEGFDFLHYDVKTGDFILHFKMNRNLSFQRGLPGFMPAWDIVFEKNETQFDAKGTPFIAGKRIVPVIENHRFTGRYRDLYPANELIALLEEKGIVFRDGSNILPKLLENDDSHAIDTMVALIRSVLQMRNSNAATGEDYINSPVRDLNGVCFDSRFQNPEWPMDADANGAYHIALKGQLLLNHLKESKDLKLQNGISNQDWLAYIQELRN

SEQ ID NO: 171 - protein, 1307 aa, Artificial Sequence
  SYNTHETIC
MTQFEGFTNLYQVSKTLRFELIPQGKTLKHIQEQGFIEEDKARNDHYKELKPIIDRIYKTYADQCLQLVQLDWENLSAAIDSYRKEKTEETRNALIEEQATYRNAIHDYFIGRTDNLTDAINKRHAEIYKGLFKAELFNGKVLKQLGTVTTTEHENALLRSFDKFTTYFSGFYENRKNVFSAEDISTAIPHRIVQDNFPKFKENCHIFTRLITAVPSLREHFENVKKAIGIFVSTSIEEVFSFPFYNQLLTQTQIDLYNQLLGGISREAGTEKIKGLNEVLNLAIQKNDETAHIIASLPHRFIPLFKQILSDRNTLSFILEEFKSDEEVIQSFCKYKTLLRNENVLETAEALFNELNSIDLTHIFISHKKLETISSALCDHWDTLRNALYERRISELTGKITKSAKEKVQRSLKHEDINLQEIISAAGKELSEAFKQKTSEILSHAHAALDQPLPTTLKKQEEKEILKSQLDSLLGLYHLLDWFAVDESNEVDPEFSARLTGIKLEMEPSLSFYNKARNYATKKPYSVEKFKLNFQMPTLASGWDVNKEKNNGAILFVKNGLYYLGIMPKQKGRYKALSFEPTEKTSEGFDKMYYDYFPDAAKMIPKCSTQLKAVAAHFQTHTTPILLSNNFIEPLEITKEIYDLNNPEKEPKKFQTAYAKKTGDQKGYREALCKWIDFTRDFLSKYTKTTSIDLSSLRPSSQYKDLGEYYAELNPLLYHISFQRIAEKEIMDAVETGKLYLFQIYNKDFAKGHHGKPNLHTLYWTGLFSPENLAKTSIKLNGQAELFYRPKSRMKRMAHRLGEKMLNKKLKDQKTPIPDTLYQELYDYVNHRLSHDLSDEARALLPNVITKEVSHEIIKDRRFTSDKFFFHVPITLNYQAANSPSKFNQRVNAYLKEHPETPIIGIDRGERNLIYITVIDSTGKILEQRSLNTIQQFDYQKKLDNREKERVAARQAWSVVGTIKDLKQGYLSQVIHEIVDLMIHYQAVVVLENLNFGFKSKRTGIAEKAVYQQFEKMLIDKLNCLVLKDYPAEKVGGVLNPYQLTDQFTSFAKMGTQSGFLFYVPAPYTSKIDPLTGFVDPFVWKTIKNHESRKHFLEGFDFLHYDVKTGDFILHFKMNRNLSFQRGLPGFMPAWDIVFEKNETQFDAKGTPFIAGKRIVPVIENHRFTGRYRDLYPANELIALLEEKGIVFRDGSNILPKLLENDDSHAIDTMVALIRSVLQMRNSNAATGEDYINSPVRDLNGVCFDSRFQNPEWPMDADANGAYHIALKGQLLLNHLKESKDLKLQNGISNQDWLAYIQELRN

SEQ ID NO: 172 - protein, 1307 aa, Artificial Sequence
  SYNTHETIC
MTQFEGFTNLYQVSKTLRFELIPQGKTLKHIQEQGFIEEDKARNDHYKELKPIIDRIYKTYADQCLQLVQLDWENLSAAIDSYRKEKTEETRNALIEEQATYRNAIHDYFIGRTDNLTDAINKRHAEIYKGLFKAELFNGKVLKQLGTVTTTEHENALLRSFDKFTTYFSGFYENRKNVFSAEDISTAIPHRIVQDNFPKFKENCHIFTRLITAVPSLREHFENVKKAIGIFVSTSIEEVFSFPFYNQLLTQTQIDLYNQLLGGISREAGTEKIKGLNEVLNLAIQKNDETAHIIASLPHRFIPLFKQILSDRNTLSFILEEFKSDEEVIQSFCKYKTLLRNENVLETAEALFNELNSIDLTHIFISHKKLETISSALCDHWDTLRNALYERRISELTGKITKSAKEKVQRSLKHEDINLQEIISAAGKELSEAFKQKTSEILSHAHAALDQPLPTTLKKQEEKEILKSQLDSLLGLYHLLDWFAVDESNEVDPEFSARLTGIKLEMEPSLSFYNKARNYATKKPYSVEKFKLNFQMPTLASGWDVNKEKNNGAILFVKNGLYYLGIMPKQKGRYKALSFEPTEKTSEGFDKMYYDYFPDAAKMIPKCSTQLKAVRAHFQTHTTPILLSNNFIEPLEITKEIYDLNNPEKEPKKFQTAYAKKTGDQKGYREALCKWIDFTRDFLSKYTKTTSIDLSSLRPSSQYKDLGEYYAELNPLLYHISFQRIAEKEIMDAVETGKLYLFQIYNKDFAKGHHGKPNLHTLYWTGLFSPENLAKTSIKLNGQAELFYRPKSRMKRMAHRLGEKMLNKKLKDQKTPIPDTLYQELYDYVNHRLSHDLSDEARALLPNVITKEVSHEIIKDRRFTSDKFFFHVPITLNYQAANSPSKFNQRVNAYLKEHPETPIIGIDRGERNLIYITVIDSTGKILEQRSLNTIQQFDYQKKLDNREKERVAARQAWSVVGTIKDLKQGYLSQVIHEIVDLMIHYQAVVVLENLNFGFKSKRTGIAEKAVYQQFEKMLIDKLNCLVLKDYPAEKVGGVLNPYQLTDQFTSFAKMGTQSGFLFYVPAPYTSKIDPLTGFVDPFVWKTIKNHESRKHFLEGFDFLHYDVKTGDFILHFKMNRNLSFQRGLPGFMPAWDIVFEKNETQFDAKGTPFIAGKRIVPVIENHRFTGRYRDLYPANELIALLEEKGIVFRDGSNILPKLLENDDSHAIDTMVALIRSVLQMRNSNAATGEDYINSPVRDLNGVCFDSRFQNPEWPMDADANGAYHIALKGQLLLNHLKESKDLKLQNGISNQDWLAYIQELRN

SEQ ID NO: 173 - protein, 1307 aa, Artificial Sequence
  SYNTHETIC
MTQFEGFTNLYQVSKTLRFELIPQGKTLKHIQEQGFIEEDKARNDHYKELKPIIDRIYKTYADQCLQLVQLDWENLSAAIDSYRKEKTEETRNALIEEQATYRNAIHDYFIGRTDNLTDAINKRHAEIYKGLFKAELFNGKVLKQLGTVTTTEHENALLRSFDKFTTYFSGFYENRKNVFSAEDISTAIPHRIVQDNFPKFKENCHIFTRLITAVPSLREHFENVKKAIGIFVSTSIEEVFSFPFYNQLLTQTQIDLYNQLLGGISREAGTEKIKGLNEVLNLAIQKNDETAHIIASLPHRFIPLFKQILSDRNTLSFILEEFKSDEEVIQSFCKYKTLLRNENVLETAEALFNELNSIDLTHIFISHKKLETISSALCDHWDTLRNALYERRISELTGKITKSAKEKVQRSLKHEDINLQEIISAAGKELSEAFKQKTSEILSHAHAALDQPLPTTLKKQEEKEILKSQLDSLLGLYHLLDWFAVDESNEVDPEFSARLTGIKLEMEPSLSFYNKARNYATKKPYSVEKFKLNFQMPTLASGWDVNKEKNNGAILFVKNGLYYLGIMPKQKGRYKALSFEPTEKTSEGFDKMYYDYFPDAAKMIPKCSTQLKAVQAHFQTHTTPILLSNNFIEPLEITKEIYDLNNPEKEPKKFQTAYAKKTGDQKGYREALCKWIDFTRDFLSKYTKTTSIDLSSLRPSSQYKDLGEYYAELNPLLYHISFQRIAEKEIMDAVETGKLYLFQIYNKDFAKGHHGKPNLHTLYWTGLFSPENLAKTSIKLNGQAELFYRPKSRMKRMAHRLGEKMLNKKLKDQKTPIPDTLYQELYDYVNHRLSHDLSDEARALLPNVITKEVSHEIIKDRRFTSDKFFFHVPITLNYQAANSPSKFNQRVNAYLKEHPETPIIGIDRGERNLIYITVIDSTGKILEQRSLNTIQQFDYQKKLDNREKERVAARQAWSVVGTIKDLKQGYLSQVIHEIVDLMIHYQAVVVLENLNFGFKSKRTGIAEKAVYQQFEKMLIDKLNCLVLKDYPAEKVGGVLNPYQLTDQFTSFAKMGTQSGFLFYVPAPYTSKIDPLTGFVDPFVWKTIKNHESRKHFLEGFDFLHYDVKTGDFILHFKMNRNLSFQRGLPGFMPAWDIVFEKNETQFDAKGTPFIAGKRIVPVIENHRFTGRYRDLYPANELIALLEEKGIVFRDGSNILPKLLENDDSHAIDTMVALIRSVLQMRNSNAATGEDYINSPVRDLNGVCFDSRFQNPEWPMDADANGAYHIALKGQLLLNHLKESKDLKLQNGISNQDWLAYIQELRN

SEQ ID NO: 174 - protein, 1307 aa, Artificial Sequence
  SYNTHETIC
MTQFEGFTNLYQVSKTLRFELIPQGKTLKHIQEQGFIEEDKARNDHYKELKPIIDRIYKTYADQCLQLVQLDWENLSAAIDSYRKEKTEETRNALIEEQATYRNAIHDYFIGRTDNLTDAINKRHAEIYKGLFKAELFNGKVLKQLGTVTTTEHENALLRSFDKFTTYFSGFYENRKNVFSAEDISTAIPHRIVQDNFPKFKENCHIFTRLITAVPSLREHFENVKKAIGIFVSTSIEEVFSFPFYNQLLTQTQIDLYNQLLGGISREAGTEKIKGLNEVLNLAIQKNDETAHIIASLPHRFIPLFKQILSDRNTLSFILEEFKSDEEVIQSFCKYKTLLRNENVLETAEALFNELNSIDLTHIFISHKKLETISSALCDHWDTLRNALYERRISELTGKITKSAKEKVQRSLKHEDINLQEIISAAGKELSEAFKQKTSEILSHAHAALDQPLPTTLKKQEEKEILKSQLDSLLGLYHLLDWFAVDESNEVDPEFSARLTGIKLEMEPSLSFYNKARNYATKKPYSVEKFKLNFQMPTLASGWDVNKEKNNGAILFVKNGLYYLGIMPKQKGRYKALSFEPTEKTSEGFDKMYYDYFPDAAKMIPKCSTQLKAVGAHFQTHTTPILLSNNFIEPLEITKEIYDLNNPEKEPKKFQTAYAKKTGDQKGYREALCKWIDFTRDFLSKYTKTTSIDLSSLRPSSQYKDLGEYYAELNPLLYHISFQRIAEKEIMDAVETGKLYLFQIYNKDFAKGHHGKPNLHTLYWTGLFSPENLAKTSIKLNGQAELFYRPKSRMKRMAHRLGEKMLNKKLKDQKTPIPDTLYQELYDYVNHRLSHDLSDEARALLPNVITKEVSHEIIKDRRFTSDKFFFHVPITLNYQAANSPSKFNQRVNAYLKEHPETPIIGIDRGERNLIYITVIDSTGKILEQRSLNTIQQFDYQKKLDNREKERVAARQAWSVVGTIKDLKQGYLSQVIHEIVDLMIHYQAVVVLENLNFGFKSKRTGIAEKAVYQQFEKMLIDKLNCLVLKDYPAEKVGGVLNPYQLTDQFTSFAKMGTQSGFLFYVPAPYTSKIDPLTGFVDPFVWKTIKNHESRKHFLEGFDFLHYDVKTGDFILHFKMNRNLSFQRGLPGFMPAWDIVFEKNETQFDAKGTPFIAGKRIVPVIENHRFTGRYRDLYPANELIALLEEKGIVFRDGSNILPKLLENDDSHAIDTMVALIRSVLQMRNSNAATGEDYINSPVRDLNGVCFDSRFQNPEWPMDADANGAYHIALKGQLLLNHLKESKDLKLQNGISNQDWLAYIQELRN

SEQ ID NO: 175 - protein, 1307 aa, Artificial Sequence
  SYNTHETIC
MTQFEGFTNLYQVSKTLRFELIPQGKTLKHIQEQGFIEEDKARNDHYKELKPIIDRIYKTYADQCLQLVQLDWENLSAAIDSYRKEKTEETRNALIEEQATYRNAIHDYFIGRTDNLTDAINKRHAEIYKGLFKAELFNGKVLKQLGTVTTTEHENALLRSFDKFTTYFSGFYENRKNVFSAEDISTAIPHRIVQDNFPKFKENCHIFTRLITAVPSLREHFENVKKAIGIFVSTSIEEVFSFPFYNQLLTQTQIDLYNQLLGGISREAGTEKIKGLNEVLNLAIQKNDETAHIIASLPHRFIPLFKQILSDRNTLSFILEEFKSDEEVIQSFCKYKTLLRNENVLETAEALFNELNSIDLTHIFISHKKLETISSALCDHWDTLRNALYERRISELTGKITKSAKEKVQRSLKHEDINLQEIISAAGKELSEAFKQKTSEILSHAHAALDQPLPTTLKKQEEKEILKSQLDSLLGLYHLLDWFAVDESNEVDPEFSARLTGIKLEMEPSLSFYNKARNYATKKPYSVEKFKLNFQMPTLASGWDVNKEKNNGAILFVKNGLYYLGIMPKQKGRYKALSFEPTEKTSEGFDKMYYDYFPDAAKMIPKCSTQLKAVYAHFQTHTTPILLSNNFIEPLEITKEIYDLNNPEKEPKKFQTAYAKKTGDQKGYREALCKWIDFTRDFLSKYTKTTSIDLSSLRPSSQYKDLGEYYAELNPLLYHISFQRIAEKEIMDAVETGKLYLFQIYNKDFAKGHHGKPNLHTLYWTGLFSPENLAKTSIKLNGQAELFYRPKSRMKRMAHRLGEKMLNKKLKDQKTPIPDTLYQELYDYVNHRLSHDLSDEARALLPNVITKEVSHEIIKDRRFTSDKFFFHVPITLNYQAANSPSKFNQRVNAYLKEHPETPIIGIDRGERNLIYITVIDSTGKILEQRSLNTIQQFDYQKKLDNREKERVAARQAWSVVGTIKDLKQGYLSQVIHEIVDLMIHYQAVVVLENLNFGFKSKRTGIAEKAVYQQFEKMLIDKLNCLVLKDYPAEKVGGVLNPYQLTDQFTSFAKMGTQSGFLFYVPAPYTSKIDPLTGFVDPFVWKTIKNHESRKHFLEGFDFLHYDVKTGDFILHFKMNRNLSFQRGLPGFMPAWDIVFEKNETQFDAKGTPFIAGKRIVPVIENHRFTGRYRDLYPANELIALLEEKGIVFRDGSNILPKLLENDDSHAIDTMVALIRSVLQMRNSNAATGEDYINSPVRDLNGVCFDSRFQNPEWPMDADANGAYHIALKGQLLLNHLKESKDLKLQNGISNQDWLAYIQELRN

SEQ ID NO: 176 - protein, 1307 aa, Artificial Sequence
  SYNTHETIC
MTQFEGFTNLYQVSKTLRFELIPQGKTLKHIQEQGFIEEDKARNDHYKELKPIIDRIYKTYADQCLQLVQLDWENLSAAIDSYRKEKTEETRNALIEEQATYRNAIHDYFIGRTDNLTDAINKRHAEIYKGLFKAELFNGKVLKQLGTVTTTEHENALLRSFDKFTTYFSGFYENRKNVFSAEDISTAIPHRIVQDNFPKFKENCHIFTRLITAVPSLREHFENVKKAIGIFVSTSIEEVFSFPFYNQLLTQTQIDLYNQLLGGISREAGTEKIKGLNEVLNLAIQKNDETAHIIASLPHRFIPLFKQILSDRNTLSFILEEFKSDEEVIQSFCKYKTLLRNENVLETAEALFNELNSIDLTHIFISHKKLETISSALCDHWDTLRNALYERRISELTGKITKSAKEKVQRSLKHEDINLQEIISAAGKELSEAFKQKTSEILSHAHAALDQPLPTTLKKQEEKEILKSQLDSLLGLYHLLDWFAVDESNEVDPEFSARLTGIKLEMEPSLSFYNKARNYATKKPYSVEKFKLNFQMPTLASGWDVNKEKNNGAILFVKNGLYYLGIMPKQKGRYKALSFEPTEKTSEGFDKMYYDYFPDAAKMIPKCSTQLKAVTGHFQTHTTPILLSNNFIEPLEITKEIYDLNNPEKEPKKFQTAYAKKTGDQKGYREALCKWIDFTRDFLSKYTKTTSIDLSSLRPSSQYKDLGEYYAELNPLLYHISFQRIAEKEIMDAVETGKLYLFQIYNKDFAKGHHGKPNLHTLYWTGLFSPENLAKTSIKLNGQAELFYRPKSRMKRMAHRLGEKMLNKKLKDQKTPIPDTLYQELYDYVNHRLSHDLSDEARALLPNVITKEVSHEIIKDRRFTSDKFFFHVPITLNYQAANSPSKFNQRVNAYLKEHPETPIIGIDRGERNLIYITVIDSTGKILEQRSLNTIQQFDYQKKLDNREKERVAARQAWSVVGTIKDLKQGYLSQVIHEIVDLMIHYQAVVVLENLNFGFKSKRTGIAEKAVYQQFEKMLIDKLNCLVLKDYPAEKVGGVLNPYQLTDQFTSFAKMGTQSGFLFYVPAPYTSKIDPLTGFVDPFVWKTIKNHESRKHFLEGFDFLHYDVKTGDFILHFKMNRNLSFQRGLPGFMPAWDIVFEKNETQFDAKGTPFIAGKRIVPVIENHRFTGRYRDLYPANELIALLEEKGIVFRDGSNILPKLLENDDSHAIDTMVALIRSVLQMRNSNAATGEDYINSPVRDLNGVCFDSRFQNPEWPMDADANGAYHIALKGQLLLNHLKESKDLKLQNGISNQDWLAYIQELRN

SEQ ID NO: 177 - protein, 1307 aa, Artificial Sequence
  SYNTHETIC
MTQFEGFTNLYQVSKTLRFELIPQGKTLKHIQEQGFIEEDKARNDHYKELKPIIDRIYKTYADQCLQLVQLDWENLSAAIDSYRKEKTEETRNALIEEQATYRNAIHDYFIGRTDNLTDAINKRHAEIYKGLFKAELFNGKVLKQLGTVTTTEHENALLRSFDKFTTYFSGFYENRKNVFSAEDISTAIPHRIVQDNFPKFKENCHIFTRLITAVPSLREHFENVKKAIGIFVSTSIEEVFSFPFYNQLLTQTQIDLYNQLLGGISREAGTEKIKGLNEVLNLAIQKNDETAHIIASLPHRFIPLFKQILSDRNTLSFILEEFKSDEEVIQSFCKYKTLLRNENVLETAEALFNELNSIDLTHIFISHKKLETISSALCDHWDTLRNALYERRISELTGKITKSAKEKVQRSLKHEDINLQEIISAAGKELSEAFKQKTSEILSHAHAALDQPLPTTLKKQEEKEILKSQLDSLLGLYHLLDWFAVDESNEVDPEFSARLTGIKLEMEPSLSFYNKARNYATKKPYSVEKFKLNFQMPTLASGWDVNKEKNNGAILFVKNGLYYLGIMPKQKGRYKALSFEPTEKTSEGFDKMYYDYFPDAAKMIPKCSTQLKAVTAHMQTHTTPILLSNNFIEPLEITKEIYDLNNPEKEPKKFQTAYAKKTGDQKGYREALCKWIDFTRDFLSKYTKTTSIDLSSLRPSSQYKDLGEYYAELNPLLYHISFQRIAEKEIMDAVETGKLYLFQIYNKDFAKGHHGKPNLHTLYWTGLFSPENLAKTSIKLNGQAELFYRPKSRMKRMAHRLGEKMLNKKLKDQKTPIPDTLYQELYDYVNHRLSHDLSDEARALLPNVITKEVSHEIIKDRRFTSDKFFFHVPITLNYQAANSPSKFNQRVNAYLKEHPETPIIGIDRGERNLIYITVIDSTGKILEQRSLNTIQQFDYQKKLDNREKERVAARQAWSVVGTIKDLKQGYLSQVIHEIVDLMIHYQAVVVLENLNFGFKSKRTGIAEKAVYQQFEKMLIDKLNCLVLKDYPAEKVGGVLNPYQLTDQFTSFAKMGTQSGFLFYVPAPYTSKIDPLTGFVDPFVWKTIKNHESRKHFLEGFDFLHYDVKTGDFILHFKMNRNLSFQRGLPGFMPAWDIVFEKNETQFDAKGTPFIAGKRIVPVIENHRFTGRYRDLYPANELIALLEEKGIVFRDGSNILPKLLENDDSHAIDTMVALIRSVLQMRNSNAATGEDYINSPVRDLNGVCFDSRFQNPEWPMDADANGAYHIALKGQLLLNHLKESKDLKLQNGISNQDWLAYIQELRN

SEQ ID NO: 178 - protein, 1307 aa, Artificial Sequence
  SYNTHETIC
MTQFEGFTNLYQVSKTLRFELIPQGKTLKHIQEQGFIEEDKARNDHYKELKPIIDRIYKTYADQCLQLVQLDWENLSAAIDSYRKEKTEETRNALIEEQATYRNAIHDYFIGRTDNLTDAINKRHAEIYKGLFKAELFNGKVLKQLGTVTTTEHENALLRSFDKFTTYFSGFYENRKNVFSAEDISTAIPHRIVQDNFPKFKENCHIFTRLITAVPSLREHFENVKKAIGIFVSTSIEEVFSFPFYNQLLTQTQIDLYNQLLGGISREAGTEKIKGLNEVLNLAIQKNDETAHIIASLPHRFIPLFKQILSDRNTLSFILEEFKSDEEVIQSFCKYKTLLRNENVLETAEALFNELNSIDLTHIFISHKKLETISSALCDHWDTLRNALYERRISELTGKITKSAKEKVQRSLKHEDINLQEIISAAGKELSEAFKQKTSEILSHAHAALDQPLPTTLKKQEEKEILKSQLDSLLGLYHLLDWFAVDESNEVDPEFSARLTGIKLEMEPSLSFYNKARNYATKKPYSVEKFKLNFQMPTLASGWDVNKEKNNGAILFVKNGLYYLGIMPKQKGRYKALSFEPTEKTSEGFDKMYYDYFPDAAKMIPKCSTQLKAVTAHFATHTTPILLSNNFIEPLEITKEIYDLNNPEKEPKKFQTAYAKKTGDQKGYREALCKWIDFTRDFLSKYTKTTSIDLSSLRPSSQYKDLGEYYAELNPLLYHISFQRIAEKEIMDAVETGKLYLFQIYNKDFAKGHHGKPNLHTLYWTGLFSPENLAKTSIKLNGQAELFYRPKSRMKRMAHRLGEKMLNKKLKDQKTPIPDTLYQELYDYVNHRLSHDLSDEARALLPNVITKEVSHEIIKDRRFTSDKFFFHVPITLNYQAANSPSKFNQRVNAYLKEHPETPIIGIDRGERNLIYITVIDSTGKILEQRSLNTIQQFDYQKKLDNREKERVAARQAWSVVGTIKDLKQGYLSQVIHEIVDLMIHYQAVVVLENLNFGFKSKRTGIAEKAVYQQFEKMLIDKLNCLVLKDYPAEKVGGVLNPYQLTDQFTSFAKMGTQSGFLFYVPAPYTSKIDPLTGFVDPFVWKTIKNHESRKHFLEGFDFLHYDVKTGDFILHFKMNRNLSFQRGLPGFMPAWDIVFEKNETQFDAKGTPFIAGKRIVPVIENHRFTGRYRDLYPANELIALLEEKGIVFRDGSNILPKLLENDDSHAIDTMVALIRSVLQMRNSNAATGEDYINSPVRDLNGVCFDSRFQNPEWPMDADANGAYHIALKGQLLLNHLKESKDLKLQNGISNQDWLAYIQELRN

SEQ ID NO: 179 - protein, 1307 aa, Artificial Sequence
  SYNTHETIC
MTQFEGFTNLYQVSKTLRFELIPQGKTLKHIQEQGFIEEDKARNDHYKELKPIIDRIYKTYADQCLQLVQLDWENLSAAIDSYRKEKTEETRNALIEEQATYRNAIHDYFIGRTDNLTDAINKRHAEIYKGLFKAELFNGKVLKQLGTVTTTEHENALLRSFDKFTTYFSGFYENRKNVFSAEDISTAIPHRIVQDNFPKFKENCHIFTRLITAVPSLREHFENVKKAIGIFVSTSIEEVFSFPFYNQLLTQTQIDLYNQLLGGISREAGTEKIKGLNEVLNLAIQKNDETAHIIASLPHRFIPLFKQILSDRNTLSFILEEFKSDEEVIQSFCKYKTLLRNENVLETAEALFNELNSIDLTHIFISHKKLETISSALCDHWDTLRNALYERRISELTGKITKSAKEKVQRSLKHEDINLQEIISAAGKELSEAFKQKTSEILSHAHAALDQPLPTTLKKQEEKEILKSQLDSLLGLYHLLDWFAVDESNEVDPEFSARLTGIKLEMEPSLSFYNKARNYATKKPYSVEKFKLNFQMPTLASGWDVNKEKNNGAILFVKNGLYYLGIMPKQKGRYKALSFEPTEKTSEGFDKMYYDYFPDAAKMIPKCSTQLKAVTAHFRTHTTPILLSNNFIEPLEITKEIYDLNNPEKEPKKFQTAYAKKTGDQKGYREALCKWIDFTRDFLSKYTKTTSIDLSSLRPSSQYKDLGEYYAELNPLLYHISFQRIAEKEIMDAVETGKLYLFQIYNKDFAKGHHGKPNLHTLYWTGLFSPENLAKTSIKLNGQAELFYRPKSRMKRMAHRLGEKMLNKKLKDQKTPIPDTLYQELYDYVNHRLSHDLSDEARALLPNVITKEVSHEIIKDRRFTSDKFFFHVPITLNYQAANSPSKFNQRVNAYLKEHPETPIIGIDRGERNLIYITVIDSTGKILEQRSLNTIQQFDYQKKLDNREKERVAARQAWSVVGTIKDLKQGYLSQVIHEIVDLMIHYQAVVVLENLNFGFKSKRTGIAEKAVYQQFEKMLIDKLNCLVLKDYPAEKVGGVLNPYQLTDQFTSFAKMGTQSGFLFYVPAPYTSKIDPLTGFVDPFVWKTIKNHESRKHFLEGFDFLHYDVKTGDFILHFKMNRNLSFQRGLPGFMPAWDIVFEKNETQFDAKGTPFIAGKRIVPVIENHRFTGRYRDLYPANELIALLEEKGIVFRDGSNILPKLLENDDSHAIDTMVALIRSVLQMRNSNAATGEDYINSPVRDLNGVCFDSRFQNPEWPMDADANGAYHIALKGQLLLNHLKESKDLKLQNGISNQDWLAYIQELRN

SEQ ID NO: 180 - protein, 1307 aa, Artificial Sequence
  SYNTHETIC
MTQFEGFTNLYQVSKTLRFELIPQGKTLKHIQEQGFIEEDKARNDHYKELKPIIDRIYKTYADQCLQLVQLDWENLSAAIDSYRKEKTEETRNALIEEQATYRNAIHDYFIGRTDNLTDAINKRHAEIYKGLFKAELFNGKVLKQLGTVTTTEHENALLRSFDKFTTYFSGFYENRKNVFSAEDISTAIPHRIVQDNFPKFKENCHIFTRLITAVPSLREHFENVKKAIGIFVSTSIEEVFSFPFYNQLLTQTQIDLYNQLLGGISREAGTEKIKGLNEVLNLAIQKNDETAHIIASLPHRFIPLFKQILSDRNTLSFILEEFKSDEEVIQSFCKYKTLLRNENVLETAEALFNELNSIDLTHIFISHKKLETISSALCDHWDTLRNALYERRISELTGKITKSAKEKVQRSLKHEDINLQEIISAAGKELSEAFKQKTSEILSHAHAALDQPLPTTLKKQEEKEILKSQLDSLLGLYHLLDWFAVDESNEVDPEFSARLTGIKLEMEPSLSFYNKARNYATKKPYSVEKFKLNFQMPTLASGWDVNKEKNNGAILFVKNGLYYLGIMPKQKGRYKALSFEPTEKTSEGFDKMYYDYFPDAAKMIPKCSTQLKAVTAHFNTHTTPILLSNNFIEPLEITKEIYDLNNPEKEPKKFQTAYAKKTGDQKGYREALCKWIDFTRDFLSKYTKTTSIDLSSLRPSSQYKDLGEYYAELNPLLYHISFQRIAEKEIMDAVETGKLYLFQIYNKDFAKGHHGKPNLHTLYWTGLFSPENLAKTSIKLNGQAELFYRPKSRMKRMAHRLGEKMLNKKLKDQKTPIPDTLYQELYDYVNHRLSHDLSDEARALLPNVITKEVSHEIIKDRRFTSDKFFFHVPITLNYQAANSPSKFNQRVNAYLKEHPETPIIGIDRGERNLIYITVIDSTGKILEQRSLNTIQQFDYQKKLDNREKERVAARQAWSVVGTIKDLKQGYLSQVIHEIVDLMIHYQAVVVLENLNFGFKSKRTGIAEKAVYQQFEKMLIDKLNCLVLKDYPAEKVGGVLNPYQLTDQFTSFAKMGTQSGFLFYVPAPYTSKIDPLTGFVDPFVWKTIKNHESRKHFLEGFDFLHYDVKTGDFILHFKMNRNLSFQRGLPGFMPAWDIVFEKNETQFDAKGTPFIAGKRIVPVIENHRFTGRYRDLYPANELIALLEEKGIVFRDGSNILPKLLENDDSHAIDTMVALIRSVLQMRNSNAATGEDYINSPVRDLNGVCFDSRFQNPEWPMDADANGAYHIALKGQLLLNHLKESKDLKLQNGISNQDWLAYIQELRN

SEQ ID NO: 181 - protein, 1307 aa, Artificial Sequence
  SYNTHETIC
MTQFEGFTNLYQVSKTLRFELIPQGKTLKHIQEQGFIEEDKARNDHYKELKPIIDRIYKTYADQCLQLVQLDWENLSAAIDSYRKEKTEETRNALIEEQATYRNAIHDYFIGRTDNLTDAINKRHAEIYKGLFKAELFNGKVLKQLGTVTTTEHENALLRSFDKFTTYFSGFYENRKNVFSAEDISTAIPHRIVQDNFPKFKENCHIFTRLITAVPSLREHFENVKKAIGIFVSTSIEEVFSFPFYNQLLTQTQIDLYNQLLGGISREAGTEKIKGLNEVLNLAIQKNDETAHIIASLPHRFIPLFKQILSDRNTLSFILEEFKSDEEVIQSFCKYKTLLRNENVLETAEALFNELNSIDLTHIFISHKKLETISSALCDHWDTLRNALYERRISELTGKITKSAKEKVQRSLKHEDINLQEIISAAGKELSEAFKQKTSEILSHAHAALDQPLPTTLKKQEEKEILKSQLDSLLGLYHLLDWFAVDESNEVDPEFSARLTGIKLEMEPSLSFYNKARNYATKKPYSVEKFKLNFQMPTLASGWDVNKEKNNGAILFVKNGLYYLGIMPKQKGRYKALSFEPTEKTSEGFDKMYYDYFPDAAKMIPKCSTQLKAVTAHFLTHTTPILLSNNFIEPLEITKEIYDLNNPEKEPKKFQTAYAKKTGDQKGYREALCKWIDFTRDFLSKYTKTTSIDLSSLRPSSQYKDLGEYYAELNPLLYHISFQRIAEKEIMDAVETGKLYLFQIYNKDFAKGHHGKPNLHTLYWTGLFSPENLAKTSIKLNGQAELFYRPKSRMKRMAHRLGEKMLNKKLKDQKTPIPDTLYQELYDYVNHRLSHDLSDEARALLPNVITKEVSHEIIKDRRFTSDKFFFHVPITLNYQAANSPSKFNQRVNAYLKEHPETPIIGIDRGERNLIYITVIDSTGKILEQRSLNTIQQFDYQKKLDNREKERVAARQAWSVVGTIKDLKQGYLSQVIHEIVDLMIHYQAVVVLENLNFGFKSKRTGIAEKAVYQQFEKMLIDKLNCLVLKDYPAEKVGGVLNPYQLTDQFTSFAKMGTQSGFLFYVPAPYTSKIDPLTGFVDPFVWKTIKNHESRKHFLEGFDFLHYDVKTGDFILHFKMNRNLSFQRGLPGFMPAWDIVFEKNETQFDAKGTPFIAGKRIVPVIENHRFTGRYRDLYPANELIALLEEKGIVFRDGSNILPKLLENDDSHAIDTMVALIRSVLQMRNSNAATGEDYINSPVRDLNGVCFDSRFQNPEWPMDADANGAYHIALKGQLLLNHLKESKDLKLQNGISNQDWLAYIQELRN

SEQ ID NO: 182 - protein, 1307 aa, Artificial Sequence
  SYNTHETIC
MTQFEGFTNLYQVSKTLRFELIPQGKTLKHIQEQGFIEEDKARNDHYKELKPIIDRIYKTYADQCLQLVQLDWENLSAAIDSYRKEKTEETRNALIEEQATYRNAIHDYFIGRTDNLTDAINKRHAEIYKGLFKAELFNGKVLKQLGTVTTTEHENALLRSFDKFTTYFSGFYENRKNVFSAEDISTAIPHRIVQDNFPKFKENCHIFTRLITAVPSLREHFENVKKAIGIFVSTSIEEVFSFPFYNQLLTQTQIDLYNQLLGGISREAGTEKIKGLNEVLNLAIQKNDETAHIIASLPHRFIPLFKQILSDRNTLSFILEEFKSDEEVIQSFCKYKTLLRNENVLETAEALFNELNSIDLTHIFISHKKLETISSALCDHWDTLRNALYERRISELTGKITKSAKEKVQRSLKHEDINLQEIISAAGKELSEAFKQKTSEILSHAHAALDQPLPTTLKKQEEKEILKSQLDSLLGLYHLLDWFAVDESNEVDPEFSARLTGIKLEMEPSLSFYNKARNYATKKPYSVEKFKLNFQMPTLASGWDVNKEKNNGAILFVKNGLYYLGIMPKQKGRYKALSFEPTEKTSEGFDKMYYDYFPDAAKMIPKCSTQLKAVTAHFKTHTTPILLSNNFIEPLEITKEIYDLNNPEKEPKKFQTAYAKKTGDQKGYREALCKWIDFTRDFLSKYTKTTSIDLSSLRPSSQYKDLGEYYAELNPLLYHISFQRIAEKEIMDAVETGKLYLFQIYNKDFAKGHHGKPNLHTLYWTGLFSPENLAKTSIKLNGQAELFYRPKSRMKRMAHRLGEKMLNKKLKDQKTPIPDTLYQELYDYVNHRLSHDLSDEARALLPNVITKEVSHEIIKDRRFTSDKFFFHVPITLNYQAANSPSKFNQRVNAYLKEHPETPIIGIDRGERNLIYITVIDSTGKILEQRSLNTIQQFDYQKKLDNREKERVAARQAWSVVGTIKDLKQGYLSQVIHEIVDLMIHYQAVVVLENLNFGFKSKRTGIAEKAVYQQFEKMLIDKLNCLVLKDYPAEKVGGVLNPYQLTDQFTSFAKMGTQSGFLFYVPAPYTSKIDPLTGFVDPFVWKTIKNHESRKHFLEGFDFLHYDVKTGDFILHFKMNRNLSFQRGLPGFMPAWDIVFEKNETQFDAKGTPFIAGKRIVPVIENHRFTGRYRDLYPANELIALLEEKGIVFRDGSNILPKLLENDDSHAIDTMVALIRSVLQMRNSNAATGEDYINSPVRDLNGVCFDSRFQNPEWPMDADANGAYHIALKGQLLLNHLKESKDLKLQNGISNQDWLAYIQELRN

SEQ ID NO: 183 - protein, 1307 aa, Artificial Sequence
  SYNTHETIC
MTQFEGFTNLYQVSKTLRFELIPQGKTLKHIQEQGFIEEDKARNDHYKELKPIIDRIYKTYADQCLQLVQLDWENLSAAIDSYRKEKTEETRNALIEEQATYRNAIHDYFIGRTDNLTDAINKRHAEIYKGLFKAELFNGKVLKQLGTVTTTEHENALLRSFDKFTTYFSGFYENRKNVFSAEDISTAIPHRIVQDNFPKFKENCHIFTRLITAVPSLREHFENVKKAIGIFVSTSIEEVFSFPFYNQLLTQTQIDLYNQLLGGISREAGTEKIKGLNEVLNLAIQKNDETAHIIASLPHRFIPLFKQILSDRNTLSFILEEFKSDEEVIQSFCKYKTLLRNENVLETAEALFNELNSIDLTHIFISHKKLETISSALCDHWDTLRNALYERRISELTGKITKSAKEKVQRSLKHEDINLQEIISAAGKELSEAFKQKTSEILSHAHAALDQPLPTTLKKQEEKEILKSQLDSLLGLYHLLDWFAVDESNEVDPEFSARLTGIKLEMEPSLSFYNKARNYATKKPYSVEKFKLNFQMPTLASGWDVNKEKNNGAILFVKNGLYYLGIMPKQKGRYKALSFEPTEKTSEGFDKMYYDYFPDAAKMIPKCSTQLKAVTAHFQAHTTPILLSNNFIEPLEITKEIYDLNNPEKEPKKFQTAYAKKTGDQKGYREALCKWIDFTRDFLSKYTKTTSIDLSSLRPSSQYKDLGEYYAELNPLLYHISFQRIAEKEIMDAVETGKLYLFQIYNKDFAKGHHGKPNLHTLYWTGLFSPENLAKTSIKLNGQAELFYRPKSRMKRMAHRLGEKMLNKKLKDQKTPIPDTLYQELYDYVNHRLSHDLSDEARALLPNVITKEVSHEIIKDRRFTSDKFFFHVPITLNYQAANSPSKFNQRVNAYLKEHPETPIIGIDRGERNLIYITVIDSTGKILEQRSLNTIQQFDYQKKLDNREKERVAARQAWSVVGTIKDLKQGYLSQVIHEIVDLMIHYQAVVVLENLNFGFKSKRTGIAEKAVYQQFEKMLIDKLNCLVLKDYPAEKVGGVLNPYQLTDQFTSFAKMGTQSGFLFYVPAPYTSKIDPLTGFVDPFVWKTIKNHESRKHFLEGFDFLHYDVKTGDFILHFKMNRNLSFQRGLPGFMPAWDIVFEKNETQFDAKGTPFIAGKRIVPVIENHRFTGRYRDLYPANELIALLEEKGIVFRDGSNILPKLLENDDSHAIDTMVALIRSVLQMRNSNAATGEDYINSPVRDLNGVCFDSRFQNPEWPMDADANGAYHIALKGQLLLNHLKESKDLKLQNGISNQDWLAYIQELRN

SEQ ID NO: 184 - protein, 1307 aa, Artificial Sequence
  SYNTHETIC
MTQFEGFTNLYQVSKTLRFELIPQGKTLKHIQEQGFIEEDKARNDHYKELKPIIDRIYKTYADQCLQLVQLDWENLSAAIDSYRKEKTEETRNALIEEQATYRNAIHDYFIGRTDNLTDAINKRHAEIYKGLFKAELFNGKVLKQLGTVTTTEHENALLRSFDKFTTYFSGFYENRKNVFSAEDISTAIPHRIVQDNFPKFKENCHIFTRLITAVPSLREHFENVKKAIGIFVSTSIEEVFSFPFYNQLLTQTQIDLYNQLLGGISREAGTEKIKGLNEVLNLAIQKNDETAHIIASLPHRFIPLFKQILSDRNTLSFILEEFKSDEEVIQSFCKYKTLLRNENVLETAEALFNELNSIDLTHIFISHKKLETISSALCDHWDTLRNALYERRISELTGKITKSAKEKVQRSLKHEDINLQEIISAAGKELSEAFKQKTSEILSHAHAALDQPLPTTLKKQEEKEILKSQLDSLLGLYHLLDWFAVDESNEVDPEFSARLTGIKLEMEPSLSFYNKARNYATKKPYSVEKFKLNFQMPTLASGWDVNKEKNNGAILFVKNGLYYLGIMPKQKGRYKALSFEPTEKTSEGFDKMYYDYFPDAAKMIPKCSTQLKAVTAHFQTGTTPILLSNNFIEPLEITKEIYDLNNPEKEPKKFQTAYAKKTGDQKGYREALCKWIDFTRDFLSKYTKTTSIDLSSLRPSSQYKDLGEYYAELNPLLYHISFQRIAEKEIMDAVETGKLYLFQIYNKDFAKGHHGKPNLHTLYWTGLFSPENLAKTSIKLNGQAELFYRPKSRMKRMAHRLGEKMLNKKLKDQKTPIPDTLYQELYDYVNHRLSHDLSDEARALLPNVITKEVSHEIIKDRRFTSDKFFFHVPITLNYQAANSPSKFNQRVNAYLKEHPETPIIGIDRGERNLIYITVIDSTGKILEQRSLNTIQQFDYQKKLDNREKERVAARQAWSVVGTIKDLKQGYLSQVIHEIVDLMIHYQAVVVLENLNFGFKSKRTGIAEKAVYQQFEKMLIDKLNCLVLKDYPAEKVGGVLNPYQLTDQFTSFAKMGTQSGFLFYVPAPYTSKIDPLTGFVDPFVWKTIKNHESRKHFLEGFDFLHYDVKTGDFILHFKMNRNLSFQRGLPGFMPAWDIVFEKNETQFDAKGTPFIAGKRIVPVIENHRFTGRYRDLYPANELIALLEEKGIVFRDGSNILPKLLENDDSHAIDTMVALIRSVLQMRNSNAATGEDYINSPVRDLNGVCFDSRFQNPEWPMDADANGAYHIALKGQLLLNHLKESKDLKLQNGISNQDWLAYIQELRN

SEQ ID NO: 185 - protein, 1307 aa, Artificial Sequence
  SYNTHETIC
MTQFEGFTNLYQVSKTLRFELIPQGKTLKHIQEQGFIEEDKARNDHYKELKPIIDRIYKTYADQCLQLVQLDWENLSAAIDSYRKEKTEETRNALIEEQATYRNAIHDYFIGRTDNLTDAINKRHAEIYKGLFKAELFNGKVLKQLGTVTTTEHENALLRSFDKFTTYFSGFYENRKNVFSAEDISTAIPHRIVQDNFPKFKENCHIFTRLITAVPSLREHFENVKKAIGIFVSTSIEEVFSFPFYNQLLTQTQIDLYNQLLGGISREAGTEKIKGLNEVLNLAIQKNDETAHIIASLPHRFIPLFKQILSDRNTLSFILEEFKSDEEVIQSFCKYKTLLRNENVLETAEALFNELNSIDLTHIFISHKKLETISSALCDHWDTLRNALYERRISELTGKITKSAKEKVQRSLKHEDINLQEIISAAGKELSEAFKQKTSEILSHAHAALDQPLPTTLKKQEEKEILKSQLDSLLGLYHLLDWFAVDESNEVDPEFSARLTGIKLEMEPSLSFYNKARNYATKKPYSVEKFKLNFQMPTLASGWDVNKEKNNGAILFVKNGLYYLGIMPKQKGRYKALSFEPTEKTSEGFDKMYYDYFPDAAKMIPKCSTQLKAVTAHFQTSTTPILLSNNFIEPLEITKEIYDLNNPEKEPKKFQTAYAKKTGDQKGYREALCKWIDFTRDFLSKYTKTTSIDLSSLRPSSQYKDLGEYYAELNPLLYHISFQRIAEKEIMDAVETGKLYLFQIYNKDFAKGHHGKPNLHTLYWTGLFSPENLAKTSIKLNGQAELFYRPKSRMKRMAHRLGEKMLNKKLKDQKTPIPDTLYQELYDYVNHRLSHDLSDEARALLPNVITKEVSHEIIKDRRFTSDKFFFHVPITLNYQAANSPSKFNQRVNAYLKEHPETPIIGIDRGERNLIYITVIDSTGKILEQRSLNTIQQFDYQKKLDNREKERVAARQAWSVVGTIKDLKQGYLSQVIHEIVDLMIHYQAVVVLENLNFGFKSKRTGIAEKAVYQQFEKMLIDKLNCLVLKDYPAEKVGGVLNPYQLTDQFTSFAKMGTQSGFLFYVPAPYTSKIDPLTGFVDPFVWKTIKNHESRKHFLEGFDFLHYDVKTGDFILHFKMNRNLSFQRGLPGFMPAWDIVFEKNETQFDAKGTPFIAGKRIVPVIENHRFTGRYRDLYPANELIALLEEKGIVFRDGSNILPKLLENDDSHAIDTMVALIRSVLQMRNSNAATGEDYINSPVRDLNGVCFDSRFQNPEWPMDADANGAYHIALKGQLLLNHLKESKDLKLQNGISNQDWLAYIQELRN

SEQ ID NO: 186 - protein, 1307 aa, Artificial Sequence
  SYNTHETIC
MTQFEGFTNLYQVSKTLRFELIPQGKTLKHIQEQGFIEEDKARNDHYKELKPIIDRIYKTYADQCLQLVQLDWENLSAAIDSYRKEKTEETRNALIEEQATYRNAIHDYFIGRTDNLTDAINKRHAEIYKGLFKAELFNGKVLKQLGTVTTTEHENALLRSFDKFTTYFSGFYENRKNVFSAEDISTAIPHRIVQDNFPKFKENCHIFTRLITAVPSLREHFENVKKAIGIFVSTSIEEVFSFPFYNQLLTQTQIDLYNQLLGGISREAGTEKIKGLNEVLNLAIQKNDETAHIIASLPHRFIPLFKQILSDRNTLSFILEEFKSDEEVIQSFCKYKTLLRNENVLETAEALFNELNSIDLTHIFISHKKLETISSALCDHWDTLRNALYERRISELTGKITKSAKEKVQRSLKHEDINLQEIISAAGKELSEAFKQKTSEILSHAHAALDQPLPTTLKKQEEKEILKSQLDSLLGLYHLLDWFAVDESNEVDPEFSARLTGIKLEMEPSLSFYNKARNYATKKPYSVEKFKLNFQMPTLASGWDVNKEKNNGAILFVKNGLYYLGIMPKQKGRYKALSFEPTEKTSEGFDKMYYDYFPDAAKMIPKCSTQLKAVTAHFQTTTTPILLSNNFIEPLEITKEIYDLNNPEKEPKKFQTAYAKKTGDQKGYREALCKWIDFTRDFLSKYTKTTSIDLSSLRPSSQYKDLGEYYAELNPLLYHISFQRIAEKEIMDAVETGKLYLFQIYNKDFAKGHHGKPNLHTLYWTGLFSPENLAKTSIKLNGQAELFYRPKSRMKRMAHRLGEKMLNKKLKDQKTPIPDTLYQELYDYVNHRLSHDLSDEARALLPNVITKEVSHEIIKDRRFTSDKFFFHVPITLNYQAANSPSKFNQRVNAYLKEHPETPIIGIDRGERNLIYITVIDSTGKILEQRSLNTIQQFDYQKKLDNREKERVAARQAWSVVGTIKDLKQGYLSQVIHEIVDLMIHYQAVVVLENLNFGFKSKRTGIAEKAVYQQFEKMLIDKLNCLVLKDYPAEKVGGVLNPYQLTDQFTSFAKMGTQSGFLFYVPAPYTSKIDPLTGFVDPFVWKTIKNHESRKHFLEGFDFLHYDVKTGDFILHFKMNRNLSFQRGLPGFMPAWDIVFEKNETQFDAKGTPFIAGKRIVPVIENHRFTGRYRDLYPANELIALLEEKGIVFRDGSNILPKLLENDDSHAIDTMVALIRSVLQMRNSNAATGEDYINSPVRDLNGVCFDSRFQNPEWPMDADANGAYHIALKGQLLLNHLKESKDLKLQNGISNQDWLAYIQELRN

SEQ ID NO: 187 - protein, 1307 aa, Artificial Sequence
  SYNTHETIC
MTQFEGFTNLYQVSKTLRFELIPQGKTLKHIQEQGFIEEDKARNDHYKELKPIIDRIYKTYADQCLQLVQLDWENLSAAIDSYRKEKTEETRNALIEEQATYRNAIHDYFIGRTDNLTDAINKRHAEIYKGLFKAELFNGKVLKQLGTVTTTEHENALLRSFDKFTTYFSGFYENRKNVFSAEDISTAIPHRIVQDNFPKFKENCHIFTRLITAVPSLREHFENVKKAIGIFVSTSIEEVFSFPFYNQLLTQTQIDLYNQLLGGISREAGTEKIKGLNEVLNLAIQKNDETAHIIASLPHRFIPLFKQILSDRNTLSFILEEFKSDEEVIQSFCKYKTLLRNENVLETAEALFNELNSIDLTHIFISHKKLETISSALCDHWDTLRNALYERRISELTGKITKSAKEKVQRSLKHEDINLQEIISAAGKELSEAFKQKTSEILSHAHAALDQPLPTTLKKQEEKEILKSQLDSLLGLYHLLDWFAVDESNEVDPEFSARLTGIKLEMEPSLSFYNKARNYATKKPYSVEKFKLNFQMPTLASGWDVNKEKNNGAILFVKNGLYYLGIMPKQKGRYKALSFEPTEKTSEGFDKMYYDYFPDAAKMIPKCSTQLKAVTAHFQTVTTPILLSNNFIEPLEITKEIYDLNNPEKEPKKFQTAYAKKTGDQKGYREALCKWIDFTRDFLSKYTKTTSIDLSSLRPSSQYKDLGEYYAELNPLLYHISFQRIAEKEIMDAVETGKLYLFQIYNKDFAKGHHGKPNLHTLYWTGLFSPENLAKTSIKLNGQAELFYRPKSRMKRMAHRLGEKMLNKKLKDQKTPIPDTLYQELYDYVNHRLSHDLSDEARALLPNVITKEVSHEIIKDRRFTSDKFFFHVPITLNYQAANSPSKFNQRVNAYLKEHPETPIIGIDRGERNLIYITVIDSTGKILEQRSLNTIQQFDYQKKLDNREKERVAARQAWSVVGTIKDLKQGYLSQVIHEIVDLMIHYQAVVVLENLNFGFKSKRTGIAEKAVYQQFEKMLIDKLNCLVLKDYPAEKVGGVLNPYQLTDQFTSFAKMGTQSGFLFYVPAPYTSKIDPLTGFVDPFVWKTIKNHESRKHFLEGFDFLHYDVKTGDFILHFKMNRNLSFQRGLPGFMPAWDIVFEKNETQFDAKGTPFIAGKRIVPVIENHRFTGRYRDLYPANELIALLEEKGIVFRDGSNILPKLLENDDSHAIDTMVALIRSVLQMRNSNAATGEDYINSPVRDLNGVCFDSRFQNPEWPMDADANGAYHIALKGQLLLNHLKESKDLKLQNGISNQDWLAYIQELRN

SEQ ID NO: 188 - protein, 1307 aa, Artificial Sequence
  SYNTHETIC
MTQFEGFTNLYQVSKTLRFELIPQGKTLKHIQEQGFIEEDKARNDHYKELKPIIDRIYKTYADQCLQLVQLDWENLSAAIDSYRKEKTEETRNALIEEQATYRNAIHDYFIGRTDNLTDAINKRHAEIYKGLFKAELFNGKVLKQLGTVTTTEHENALLRSFDKFTTYFSGFYENRKNVFSAEDISTAIPHRIVQDNFPKFKENCHIFTRLITAVPSLREHFENVKKAIGIFVSTSIEEVFSFPFYNQLLTQTQIDLYNQLLGGISREAGTEKIKGLNEVLNLAIQKNDETAHIIASLPHRFIPLFKQILSDRNTLSFILEEFKSDEEVIQSFCKYKTLLRNENVLETAEALFNELNSIDLTHIFISHKKLETISSALCDHWDTLRNALYERRISELTGKITKSAKEKVQRSLKHEDINLQEIISAAGKELSEAFKQKTSEILSHAHAALDQPLPTTLKKQEEKEILKSQLDSLLGLYHLLDWFAVDESNEVDPEFSARLTGIKLEMEPSLSFYNKARNYATKKPYSVEKFKLNFQMPTLASGWDVNKEKNNGAILFVKNGLYYLGIMPKQKGRYKALSFEPTEKTSEGFDKMYYDYFPDAAKMIPKCSTQLKAVTAHFQTHETPILLSNNFIEPLEITKEIYDLNNPEKEPKKFQTAYAKKTGDQKGYREALCKWIDFTRDFLSKYTKTTSIDLSSLRPSSQYKDLGEYYAELNPLLYHISFQRIAEKEIMDAVETGKLYLFQIYNKDFAKGHHGKPNLHTLYWTGLFSPENLAKTSIKLNGQAELFYRPKSRMKRMAHRLGEKMLNKKLKDQKTPIPDTLYQELYDYVNHRLSHDLSDEARALLPNVITKEVSHEIIKDRRFTSDKFFFHVPITLNYQAANSPSKFNQRVNAYLKEHPETPIIGIDRGERNLIYITVIDSTGKILEQRSLNTIQQFDYQKKLDNREKERVAARQAWSVVGTIKDLKQGYLSQVIHEIVDLMIHYQAVVVLENLNFGFKSKRTGIAEKAVYQQFEKMLIDKLNCLVLKDYPAEKVGGVLNPYQLTDQFTSFAKMGTQSGFLFYVPAPYTSKIDPLTGFVDPFVWKTIKNHESRKHFLEGFDFLHYDVKTGDFILHFKMNRNLSFQRGLPGFMPAWDIVFEKNETQFDAKGTPFIAGKRIVPVIENHRFTGRYRDLYPANELIALLEEKGIVFRDGSNILPKLLENDDSHAIDTMVALIRSVLQMRNSNAATGEDYINSPVRDLNGVCFDSRFQNPEWPMDADANGAYHIALKGQLLLNHLKESKDLKLQNGISNQDWLAYIQELRN

SEQ ID NO: 189 - protein, 1307 aa, Artificial Sequence
  SYNTHETIC
MTQFEGFTNLYQVSKTLRFELIPQGKTLKHIQEQGFIEEDKARNDHYKELKPIIDRIYKTYADQCLQLVQLDWENLSAAIDSYRKEKTEETRNALIEEQATYRNAIHDYFIGRTDNLTDAINKRHAEIYKGLFKAELFNGKVLKQLGTVTTTEHENALLRSFDKFTTYFSGFYENRKNVFSAEDISTAIPHRIVQDNFPKFKENCHIFTRLITAVPSLREHFENVKKAIGIFVSTSIEEVFSFPFYNQLLTQTQIDLYNQLLGGISREAGTEKIKGLNEVLNLAIQKNDETAHIIASLPHRFIPLFKQILSDRNTLSFILEEFKSDEEVIQSFCKYKTLLRNENVLETAEALFNELNSIDLTHIFISHKKLETISSALCDHWDTLRNALYERRISELTGKITKSAKEKVQRSLKHEDINLQEIISAAGKELSEAFKQKTSEILSHAHAALDQPLPTTLKKQEEKEILKSQLDSLLGLYHLLDWFAVDESNEVDPEFSARLTGIKLEMEPSLSFYNKARNYATKKPYSVEKFKLNFQMPTLASGWDVNKEKNNGAILFVKNGLYYLGIMPKQKGRYKALSFEPTEKTSEGFDKMYYDYFPDAAKMIPKCSTQLKAVTAHFQTHHTPILLSNNFIEPLEITKEIYDLNNPEKEPKKFQTAYAKKTGDQKGYREALCKWIDFTRDFLSKYTKTTSIDLSSLRPSSQYKDLGEYYAELNPLLYHISFQRIAEKEIMDAVETGKLYLFQIYNKDFAKGHHGKPNLHTLYWTGLFSPENLAKTSIKLNGQAELFYRPKSRMKRMAHRLGEKMLNKKLKDQKTPIPDTLYQELYDYVNHRLSHDLSDEARALLPNVITKEVSHEIIKDRRFTSDKFFFHVPITLNYQAANSPSKFNQRVNAYLKEHPETPIIGIDRGERNLIYITVIDSTGKILEQRSLNTIQQFDYQKKLDNREKERVAARQAWSVVGTIKDLKQGYLSQVIHEIVDLMIHYQAVVVLENLNFGFKSKRTGIAEKAVYQQFEKMLIDKLNCLVLKDYPAEKVGGVLNPYQLTDQFTSFAKMGTQSGFLFYVPAPYTSKIDPLTGFVDPFVWKTIKNHESRKHFLEGFDFLHYDVKTGDFILHFKMNRNLSFQRGLPGFMPAWDIVFEKNETQFDAKGTPFIAGKRIVPVIENHRFTGRYRDLYPANELIALLEEKGIVFRDGSNILPKLLENDDSHAIDTMVALIRSVLQMRNSNAATGEDYINSPVRDLNGVCFDSRFQNPEWPMDADANGAYHIALKGQLLLNHLKESKDLKLQNGISNQDWLAYIQELRN

SEQ ID NO: 190 - protein, 1307 aa, Artificial Sequence
  SYNTHETIC
MTQFEGFTNLYQVSKTLRFELIPQGKTLKHIQEQGFIEEDKARNDHYKELKPIIDRIYKTYADQCLQLVQLDWENLSAAIDSYRKEKTEETRNALIEEQATYRNAIHDYFIGRTDNLTDAINKRHAEIYKGLFKAELFNGKVLKQLGTVTTTEHENALLRSFDKFTTYFSGFYENRKNVFSAEDISTAIPHRIVQDNFPKFKENCHIFTRLITAVPSLREHFENVKKAIGIFVSTSIEEVFSFPFYNQLLTQTQIDLYNQLLGGISREAGTEKIKGLNEVLNLAIQKNDETAHIIASLPHRFIPLFKQILSDRNTLSFILEEFKSDEEVIQSFCKYKTLLRNENVLETAEALFNELNSIDLTHIFISHKKLETISSALCDHWDTLRNALYERRISELTGKITKSAKEKVQRSLKHEDINLQEIISAAGKELSEAFKQKTSEILSHAHAALDQPLPTTLKKQEEKEILKSQLDSLLGLYHLLDWFAVDESNEVDPEFSARLTGIKLEMEPSLSFYNKARNYATKKPYSVEKFKLNFQMPTLASGWDVNKEKNNGAILFVKNGLYYLGIMPKQKGRYKALSFEPTEKTSEGFDKMYYDYFPDAAKMIPKCSTQLKAVTAHFQTHLTPILLSNNFIEPLEITKEIYDLNNPEKEPKKFQTAYAKKTGDQKGYREALCKWIDFTRDFLSKYTKTTSIDLSSLRPSSQYKDLGEYYAELNPLLYHISFQRIAEKEIMDAVETGKLYLFQIYNKDFAKGHHGKPNLHTLYWTGLFSPENLAKTSIKLNGQAELFYRPKSRMKRMAHRLGEKMLNKKLKDQKTPIPDTLYQELYDYVNHRLSHDLSDEARALLPNVITKEVSHEIIKDRRFTSDKFFFHVPITLNYQAANSPSKFNQRVNAYLKEHPETPIIGIDRGERNLIYITVIDSTGKILEQRSLNTIQQFDYQKKLDNREKERVAARQAWSVVGTIKDLKQGYLSQVIHEIVDLMIHYQAVVVLENLNFGFKSKRTGIAEKAVYQQFEKMLIDKLNCLVLKDYPAEKVGGVLNPYQLTDQFTSFAKMGTQSGFLFYVPAPYTSKIDPLTGFVDPFVWKTIKNHESRKHFLEGFDFLHYDVKTGDFILHFKMNRNLSFQRGLPGFMPAWDIVFEKNETQFDAKGTPFIAGKRIVPVIENHRFTGRYRDLYPANELIALLEEKGIVFRDGSNILPKLLENDDSHAIDTMVALIRSVLQMRNSNAATGEDYINSPVRDLNGVCFDSRFQNPEWPMDADANGAYHIALKGQLLLNHLKESKDLKLQNGISNQDWLAYIQELRN

SEQ ID NO: 191 - protein, 1307 aa, Artificial Sequence
  SYNTHETIC
MTQFEGFTNLYQVSKTLRFELIPQGKTLKHIQEQGFIEEDKARNDHYKELKPIIDRIYKTYADQCLQLVQLDWENLSAAIDSYRKEKTEETRNALIEEQATYRNAIHDYFIGRTDNLTDAINKRHAEIYKGLFKAELFNGKVLKQLGTVTTTEHENALLRSFDKFTTYFSGFYENRKNVFSAEDISTAIPHRIVQDNFPKFKENCHIFTRLITAVPSLREHFENVKKAIGIFVSTSIEEVFSFPFYNQLLTQTQIDLYNQLLGGISREAGTEKIKGLNEVLNLAIQKNDETAHIIASLPHRFIPLFKQILSDRNTLSFILEEFKSDEEVIQSFCKYKTLLRNENVLETAEALFNELNSIDLTHIFISHKKLETISSALCDHWDTLRNALYERRISELTGKITKSAKEKVQRSLKHEDINLQEIISAAGKELSEAFKQKTSEILSHAHAALDQPLPTTLKKQEEKEILKSQLDSLLGLYHLLDWFAVDESNEVDPEFSARLTGIKLEMEPSLSFYNKARNYATKKPYSVEKFKLNFQMPTLASGWDVNKEKNNGAILFVKNGLYYLGIMPKQKGRYKALSFEPTEKTSEGFDKMYYDYFPDAAKMIPKCSTQLKAVTAHFQTHMTPILLSNNFIEPLEITKEIYDLNNPEKEPKKFQTAYAKKTGDQKGYREALCKWIDFTRDFLSKYTKTTSIDLSSLRPSSQYKDLGEYYAELNPLLYHISFQRIAEKEIMDAVETGKLYLFQIYNKDFAKGHHGKPNLHTLYWTGLFSPENLAKTSIKLNGQAELFYRPKSRMKRMAHRLGEKMLNKKLKDQKTPIPDTLYQELYDYVNHRLSHDLSDEARALLPNVITKEVSHEIIKDRRFTSDKFFFHVPITLNYQAANSPSKFNQRVNAYLKEHPETPIIGIDRGERNLIYITVIDSTGKILEQRSLNTIQQFDYQKKLDNREKERVAARQAWSVVGTIKDLKQGYLSQVIHEIVDLMIHYQAVVVLENLNFGFKSKRTGIAEKAVYQQFEKMLIDKLNCLVLKDYPAEKVGGVLNPYQLTDQFTSFAKMGTQSGFLFYVPAPYTSKIDPLTGFVDPFVWKTIKNHESRKHFLEGFDFLHYDVKTGDFILHFKMNRNLSFQRGLPGFMPAWDIVFEKNETQFDAKGTPFIAGKRIVPVIENHRFTGRYRDLYPANELIALLEEKGIVFRDGSNILPKLLENDDSHAIDTMVALIRSVLQMRNSNAATGEDYINSPVRDLNGVCFDSRFQNPEWPMDADANGAYHIALKGQLLLNHLKESKDLKLQNGISNQDWLAYIQELRN

SEQ ID NO: 192 - protein, 1307 aa, Artificial Sequence
  SYNTHETIC
MTQFEGFTNLYQVSKTLRFELIPQGKTLKHIQEQGFIEEDKARNDHYKELKPIIDRIYKTYADQCLQLVQLDWENLSAAIDSYRKEKTEETRNALIEEQATYRNAIHDYFIGRTDNLTDAINKRHAEIYKGLFKAELFNGKVLKQLGTVTTTEHENALLRSFDKFTTYFSGFYENRKNVFSAEDISTAIPHRIVQDNFPKFKENCHIFTRLITAVPSLREHFENVKKAIGIFVSTSIEEVFSFPFYNQLLTQTQIDLYNQLLGGISREAGTEKIKGLNEVLNLAIQKNDETAHIIASLPHRFIPLFKQILSDRNTLSFILEEFKSDEEVIQSFCKYKTLLRNENVLETAEALFNELNSIDLTHIFISHKKLETISSALCDHWDTLRNALYERRISELTGKITKSAKEKVQRSLKHEDINLQEIISAAGKELSEAFKQKTSEILSHAHAALDQPLPTTLKKQEEKEILKSQLDSLLGLYHLLDWFAVDESNEVDPEFSARLTGIKLEMEPSLSFYNKARNYATKKPYSVEKFKLNFQMPTLASGWDVNKEKNNGAILFVKNGLYYLGIMPKQKGRYKALSFEPTEKTSEGFDKMYYDYFPDAAKMIPKCSTQLKAVTAHFQTHFTPILLSNNFIEPLEITKEIYDLNNPEKEPKKFQTAYAKKTGDQKGYREALCKWIDFTRDFLSKYTKTTSIDLSSLRPSSQYKDLGEYYAELNPLLYHISFQRIAEKEIMDAVETGKLYLFQIYNKDFAKGHHGKPNLHTLYWTGLFSPENLAKTSIKLNGQAELFYRPKSRMKRMAHRLGEKMLNKKLKDQKTPIPDTLYQELYDYVNHRLSHDLSDEARALLPNVITKEVSHEIIKDRRFTSDKFFFHVPITLNYQAANSPSKFNQRVNAYLKEHPETPIIGIDRGERNLIYITVIDSTGKILEQRSLNTIQQFDYQKKLDNREKERVAARQAWSVVGTIKDLKQGYLSQVIHEIVDLMIHYQAVVVLENLNFGFKSKRTGIAEKAVYQQFEKMLIDKLNCLVLKDYPAEKVGGVLNPYQLTDQFTSFAKMGTQSGFLFYVPAPYTSKIDPLTGFVDPFVWKTIKNHESRKHFLEGFDFLHYDVKTGDFILHFKMNRNLSFQRGLPGFMPAWDIVFEKNETQFDAKGTPFIAGKRIVPVIENHRFTGRYRDLYPANELIALLEEKGIVFRDGSNILPKLLENDDSHAIDTMVALIRSVLQMRNSNAATGEDYINSPVRDLNGVCFDSRFQNPEWPMDADANGAYHIALKGQLLLNHLKESKDLKLQNGISNQDWLAYIQELRN

SEQ ID NO: 193 - protein, 1307 aa, Artificial Sequence
  SYNTHETIC
MTQFEGFTNLYQVSKTLRFELIPQGKTLKHIQEQGFIEEDKARNDHYKELKPIIDRIYKTYADQCLQLVQLDWENLSAAIDSYRKEKTEETRNALIEEQATYRNAIHDYFIGRTDNLTDAINKRHAEIYKGLFKAELFNGKVLKQLGTVTTTEHENALLRSFDKFTTYFSGFYENRKNVFSAEDISTAIPHRIVQDNFPKFKENCHIFTRLITAVPSLREHFENVKKAIGIFVSTSIEEVFSFPFYNQLLTQTQIDLYNQLLGGISREAGTEKIKGLNEVLNLAIQKNDETAHIIASLPHRFIPLFKQILSDRNTLSFILEEFKSDEEVIQSFCKYKTLLRNENVLETAEALFNELNSIDLTHIFISHKKLETISSALCDHWDTLRNALYERRISELTGKITKSAKEKVQRSLKHEDINLQEIISAAGKELSEAFKQKTSEILSHAHAALDQPLPTTLKKQEEKEILKSQLDSLLGLYHLLDWFAVDESNEVDPEFSARLTGIKLEMEPSLSFYNKARNYATKKPYSVEKFKLNFQMPTLASGWDVNKEKNNGAILFVKNGLYYLGIMPKQKGRYKALSFEPTEKTSEGFDKMYYDYFPDAAKMIPKCSTQLKAVTAHFQTHTPPILLSNNFIEPLEITKEIYDLNNPEKEPKKFQTAYAKKTGDQKGYREALCKWIDFTRDFLSKYTKTTSIDLSSLRPSSQYKDLGEYYAELNPLLYHISFQRIAEKEIMDAVETGKLYLFQIYNKDFAKGHHGKPNLHTLYWTGLFSPENLAKTSIKLNGQAELFYRPKSRMKRMAHRLGEKMLNKKLKDQKTPIPDTLYQELYDYVNHRLSHDLSDEARALLPNVITKEVSHEIIKDRRFTSDKFFFHVPITLNYQAANSPSKFNQRVNAYLKEHPETPIIGIDRGERNLIYITVIDSTGKILEQRSLNTIQQFDYQKKLDNREKERVAARQAWSVVGTIKDLKQGYLSQVIHEIVDLMIHYQAVVVLENLNFGFKSKRTGIAEKAVYQQFEKMLIDKLNCLVLKDYPAEKVGGVLNPYQLTDQFTSFAKMGTQSGFLFYVPAPYTSKIDPLTGFVDPFVWKTIKNHESRKHFLEGFDFLHYDVKTGDFILHFKMNRNLSFQRGLPGFMPAWDIVFEKNETQFDAKGTPFIAGKRIVPVIENHRFTGRYRDLYPANELIALLEEKGIVFRDGSNILPKLLENDDSHAIDTMVALIRSVLQMRNSNAATGEDYINSPVRDLNGVCFDSRFQNPEWPMDADANGAYHIALKGQLLLNHLKESKDLKLQNGISNQDWLAYIQELRN

SEQ ID NO: 194 - protein, 1307 aa, Artificial Sequence
  SYNTHETIC
MTQFEGFTNLYQVSKTLRFELIPQGKTLKHIQEQGFIEEDKARNDHYKELKPIIDRIYKTYADQCLQLVQLDWENLSAAIDSYRKEKTEETRNALIEEQATYRNAIHDYFIGRTDNLTDAINKRHAEIYKGLFKAELFNGKVLKQLGTVTTTEHENALLRSFDKFTTYFSGFYENRKNVFSAEDISTAIPHRIVQDNFPKFKENCHIFTRLITAVPSLREHFENVKKAIGIFVSTSIEEVFSFPFYNQLLTQTQIDLYNQLLGGISREAGTEKIKGLNEVLNLAIQKNDETAHIIASLPHRFIPLFKQILSDRNTLSFILEEFKSDEEVIQSFCKYKTLLRNENVLETAEALFNELNSIDLTHIFISHKKLETISSALCDHWDTLRNALYERRISELTGKITKSAKEKVQRSLKHEDINLQEIISAAGKELSEAFKQKTSEILSHAHAALDQPLPTTLKKQEEKEILKSQLDSLLGLYHLLDWFAVDESNEVDPEFSARLTGIKLEMEPSLSFYNKARNYATKKPYSVEKFKLNFQMPTLASGWDVNKEKNNGAILFVKNGLYYLGIMPKQKGRYKALSFEPTEKTSEGFDKMYYDYFPDAAKMIPKCSTQLKAVTAHFQTHTTPICLSNNFIEPLEITKEIYDLNNPEKEPKKFQTAYAKKTGDQKGYREALCKWIDFTRDFLSKYTKTTSIDLSSLRPSSQYKDLGEYYAELNPLLYHISFQRIAEKEIMDAVETGKLYLFQIYNKDFAKGHHGKPNLHTLYWTGLFSPENLAKTSIKLNGQAELFYRPKSRMKRMAHRLGEKMLNKKLKDQKTPIPDTLYQELYDYVNHRLSHDLSDEARALLPNVITKEVSHEIIKDRRFTSDKFFFHVPITLNYQAANSPSKFNQRVNAYLKEHPETPIIGIDRGERNLIYITVIDSTGKILEQRSLNTIQQFDYQKKLDNREKERVAARQAWSVVGTIKDLKQGYLSQVIHEIVDLMIHYQAVVVLENLNFGFKSKRTGIAEKAVYQQFEKMLIDKLNCLVLKDYPAEKVGGVLNPYQLTDQFTSFAKMGTQSGFLFYVPAPYTSKIDPLTGFVDPFVWKTIKNHESRKHFLEGFDFLHYDVKTGDFILHFKMNRNLSFQRGLPGFMPAWDIVFEKNETQFDAKGTPFIAGKRIVPVIENHRFTGRYRDLYPANELIALLEEKGIVFRDGSNILPKLLENDDSHAIDTMVALIRSVLQMRNSNAATGEDYINSPVRDLNGVCFDSRFQNPEWPMDADANGAYHIALKGQLLLNHLKESKDLKLQNGISNQDWLAYIQELRN

SEQ ID NO: 195 - protein, 1307 aa, Artificial Sequence
  SYNTHETIC
MTQFEGFTNLYQVSKTLRFELIPQGKTLKHIQEQGFIEEDKARNDHYKELKPIIDRIYKTYADQCLQLVQLDWENLSAAIDSYRKEKTEETRNALIEEQATYRNAIHDYFIGRTDNLTDAINKRHAEIYKGLFKAELFNGKVLKQLGTVTTTEHENALLRSFDKFTTYFSGFYENRKNVFSAEDISTAIPHRIVQDNFPKFKENCHIFTRLITAVPSLREHFENVKKAIGIFVSTSIEEVFSFPFYNQLLTQTQIDLYNQLLGGISREAGTEKIKGLNEVLNLAIQKNDETAHIIASLPHRFIPLFKQILSDRNTLSFILEEFKSDEEVIQSFCKYKTLLRNENVLETAEALFNELNSIDLTHIFISHKKLETISSALCDHWDTLRNALYERRISELTGKITKSAKEKVQRSLKHEDINLQEIISAAGKELSEAFKQKTSEILSHAHAALDQPLPTTLKKQEEKEILKSQLDSLLGLYHLLDWFAVDESNEVDPEFSARLTGIKLEMEPSLSFYNKARNYATKKPYSVEKFKLNFQMPTLASGWDVNKEKNNGAILFVKNGLYYLGIMPKQKGRYKALSFEPTEKTSEGFDKMYYDYFPDAAKMIPKCSTQLKAVTAHFQTHTTPILCSNNFIEPLEITKEIYDLNNPEKEPKKFQTAYAKKTGDQKGYREALCKWIDFTRDFLSKYTKTTSIDLSSLRPSSQYKDLGEYYAELNPLLYHISFQRIAEKEIMDAVETGKLYLFQIYNKDFAKGHHGKPNLHTLYWTGLFSPENLAKTSIKLNGQAELFYRPKSRMKRMAHRLGEKMLNKKLKDQKTPIPDTLYQELYDYVNHRLSHDLSDEARALLPNVITKEVSHEIIKDRRFTSDKFFFHVPITLNYQAANSPSKFNQRVNAYLKEHPETPIIGIDRGERNLIYITVIDSTGKILEQRSLNTIQQFDYQKKLDNREKERVAARQAWSVVGTIKDLKQGYLSQVIHEIVDLMIHYQAVVVLENLNFGFKSKRTGIAEKAVYQQFEKMLIDKLNCLVLKDYPAEKVGGVLNPYQLTDQFTSFAKMGTQSGFLFYVPAPYTSKIDPLTGFVDPFVWKTIKNHESRKHFLEGFDFLHYDVKTGDFILHFKMNRNLSFQRGLPGFMPAWDIVFEKNETQFDAKGTPFIAGKRIVPVIENHRFTGRYRDLYPANELIALLEEKGIVFRDGSNILPKLLENDDSHAIDTMVALIRSVLQMRNSNAATGEDYINSPVRDLNGVCFDSRFQNPEWPMDADANGAYHIALKGQLLLNHLKESKDLKLQNGISNQDWLAYIQELRN

SEQ ID NO: 196 - protein, 1307 aa, Artificial Sequence
  SYNTHETIC
MTQFEGFTNLYQVSKTLRFELIPQGKTLKHIQEQGFIEEDKARNDHYKELKPIIDRIYKTYADQCLQLVQLDWENLSAAIDSYRKEKTEETRNALIEEQATYRNAIHDYFIGRTDNLTDAINKRHAEIYKGLFKAELFNGKVLKQLGTVTTTEHENALLRSFDKFTTYFSGFYENRKNVFSAEDISTAIPHRIVQDNFPKFKENCHIFTRLITAVPSLREHFENVKKAIGIFVSTSIEEVFSFPFYNQLLTQTQIDLYNQLLGGISREAGTEKIKGLNEVLNLAIQKNDETAHIIASLPHRFIPLFKQILSDRNTLSFILEEFKSDEEVIQSFCKYKTLLRNENVLETAEALFNELNSIDLTHIFISHKKLETISSALCDHWDTLRNALYERRISELTGKITKSAKEKVQRSLKHEDINLQEIISAAGKELSEAFKQKTSEILSHAHAALDQPLPTTLKKQEEKEILKSQLDSLLGLYHLLDWFAVDESNEVDPEFSARLTGIKLEMEPSLSFYNKARNYATKKPYSVEKFKLNFQMPTLASGWDVNKEKNNGAILFVKNGLYYLGIMPKQKGRYKALSFEPTEKTSEGFDKMYYDYFPDAAKMIPKCSTQLKAVTAHFQTHTTPILWSNNFIEPLEITKEIYDLNNPEKEPKKFQTAYAKKTGDQKGYREALCKWIDFTRDFLSKYTKTTSIDLSSLRPSSQYKDLGEYYAELNPLLYHISFQRIAEKEIMDAVETGKLYLFQIYNKDFAKGHHGKPNLHTLYWTGLFSPENLAKTSIKLNGQAELFYRPKSRMKRMAHRLGEKMLNKKLKDQKTPIPDTLYQELYDYVNHRLSHDLSDEARALLPNVITKEVSHEIIKDRRFTSDKFFFHVPITLNYQAANSPSKFNQRVNAYLKEHPETPIIGIDRGERNLIYITVIDSTGKILEQRSLNTIQQFDYQKKLDNREKERVAARQAWSVVGTIKDLKQGYLSQVIHEIVDLMIHYQAVVVLENLNFGFKSKRTGIAEKAVYQQFEKMLIDKLNCLVLKDYPAEKVGGVLNPYQLTDQFTSFAKMGTQSGFLFYVPAPYTSKIDPLTGFVDPFVWKTIKNHESRKHFLEGFDFLHYDVKTGDFILHFKMNRNLSFQRGLPGFMPAWDIVFEKNETQFDAKGTPFIAGKRIVPVIENHRFTGRYRDLYPANELIALLEEKGIVFRDGSNILPKLLENDDSHAIDTMVALIRSVLQMRNSNAATGEDYINSPVRDLNGVCFDSRFQNPEWPMDADANGAYHIALKGQLLLNHLKESKDLKLQNGISNQDWLAYIQELRN

SEQ ID NO: 197 - protein, 1307 aa, Artificial Sequence
  SYNTHETIC
MTQFEGFTNLYQVSKTLRFELIPQGKTLKHIQEQGFIEEDKARNDHYKELKPIIDRIYKTYADQCLQLVQLDWENLSAAIDSYRKEKTEETRNALIEEQATYRNAIHDYFIGRTDNLTDAINKRHAEIYKGLFKAELFNGKVLKQLGTVTTTEHENALLRSFDKFTTYFSGFYENRKNVFSAEDISTAIPHRIVQDNFPKFKENCHIFTRLITAVPSLREHFENVKKAIGIFVSTSIEEVFSFPFYNQLLTQTQIDLYNQLLGGISREAGTEKIKGLNEVLNLAIQKNDETAHIIASLPHRFIPLFKQILSDRNTLSFILEEFKSDEEVIQSFCKYKTLLRNENVLETAEALFNELNSIDLTHIFISHKKLETISSALCDHWDTLRNALYERRISELTGKITKSAKEKVQRSLKHEDINLQEIISAAGKELSEAFKQKTSEILSHAHAALDQPLPTTLKKQEEKEILKSQLDSLLGLYHLLDWFAVDESNEVDPEFSARLTGIKLEMEPSLSFYNKARNYATKKPYSVEKFKLNFQMPTLASGWDVNKEKNNGAILFVKNGLYYLGIMPKQKGRYKALSFEPTEKTSEGFDKMYYDYFPDAAKMIPKCSTQLKAVTAHFQTHTTPILLSRNFIEPLEITKEIYDLNNPEKEPKKFQTAYAKKTGDQKGYREALCKWIDFTRDFLSKYTKTTSIDLSSLRPSSQYKDLGEYYAELNPLLYHISFQRIAEKEIMDAVETGKLYLFQIYNKDFAKGHHGKPNLHTLYWTGLFSPENLAKTSIKLNGQAELFYRPKSRMKRMAHRLGEKMLNKKLKDQKTPIPDTLYQELYDYVNHRLSHDLSDEARALLPNVITKEVSHEIIKDRRFTSDKFFFHVPITLNYQAANSPSKFNQRVNAYLKEHPETPIIGIDRGERNLIYITVIDSTGKILEQRSLNTIQQFDYQKKLDNREKERVAARQAWSVVGTIKDLKQGYLSQVIHEIVDLMIHYQAVVVLENLNFGFKSKRTGIAEKAVYQQFEKMLIDKLNCLVLKDYPAEKVGGVLNPYQLTDQFTSFAKMGTQSGFLFYVPAPYTSKIDPLTGFVDPFVWKTIKNHESRKHFLEGFDFLHYDVKTGDFILHFKMNRNLSFQRGLPGFMPAWDIVFEKNETQFDAKGTPFIAGKRIVPVIENHRFTGRYRDLYPANELIALLEEKGIVFRDGSNILPKLLENDDSHAIDTMVALIRSVLQMRNSNAATGEDYINSPVRDLNGVCFDSRFQNPEWPMDADANGAYHIALKGQLLLNHLKESKDLKLQNGISNQDWLAYIQELRN

SEQ ID NO: 198 - protein, 1307 aa, Artificial Sequence
  SYNTHETIC
MTQFEGFTNLYQVSKTLRFELIPQGKTLKHIQEQGFIEEDKARNDHYKELKPIIDRIYKTYADQCLQLVQLDWENLSAAIDSYRKEKTEETRNALIEEQATYRNAIHDYFIGRTDNLTDAINKRHAEIYKGLFKAELFNGKVLKQLGTVTTTEHENALLRSFDKFTTYFSGFYENRKNVFSAEDISTAIPHRIVQDNFPKFKENCHIFTRLITAVPSLREHFENVKKAIGIFVSTSIEEVFSFPFYNQLLTQTQIDLYNQLLGGISREAGTEKIKGLNEVLNLAIQKNDETAHIIASLPHRFIPLFKQILSDRNTLSFILEEFKSDEEVIQSFCKYKTLLRNENVLETAEALFNELNSIDLTHIFISHKKLETISSALCDHWDTLRNALYERRISELTGKITKSAKEKVQRSLKHEDINLQEIISAAGKELSEAFKQKTSEILSHAHAALDQPLPTTLKKQEEKEILKSQLDSLLGLYHLLDWFAVDESNEVDPEFSARLTGIKLEMEPSLSFYNKARNYATKKPYSVEKFKLNFQMPTLASGWDVNKEKNNGAILFVKNGLYYLGIMPKQKGRYKALSFEPTEKTSEGFDKMYYDYFPDAAKMIPKCSTQLKAVTAHFQTHTTPILLSNNFNEPLEITKEIYDLNNPEKEPKKFQTAYAKKTGDQKGYREALCKWIDFTRDFLSKYTKTTSIDLSSLRPSSQYKDLGEYYAELNPLLYHISFQRIAEKEIMDAVETGKLYLFQIYNKDFAKGHHGKPNLHTLYWTGLFSPENLAKTSIKLNGQAELFYRPKSRMKRMAHRLGEKMLNKKLKDQKTPIPDTLYQELYDYVNHRLSHDLSDEARALLPNVITKEVSHEIIKDRRFTSDKFFFHVPITLNYQAANSPSKFNQRVNAYLKEHPETPIIGIDRGERNLIYITVIDSTGKILEQRSLNTIQQFDYQKKLDNREKERVAARQAWSVVGTIKDLKQGYLSQVIHEIVDLMIHYQAVVVLENLNFGFKSKRTGIAEKAVYQQFEKMLIDKLNCLVLKDYPAEKVGGVLNPYQLTDQFTSFAKMGTQSGFLFYVPAPYTSKIDPLTGFVDPFVWKTIKNHESRKHFLEGFDFLHYDVKTGDFILHFKMNRNLSFQRGLPGFMPAWDIVFEKNETQFDAKGTPFIAGKRIVPVIENHRFTGRYRDLYPANELIALLEEKGIVFRDGSNILPKLLENDDSHAIDTMVALIRSVLQMRNSNAATGEDYINSPVRDLNGVCFDSRFQNPEWPMDADANGAYHIALKGQLLLNHLKESKDLKLQNGISNQDWLAYIQELRN

SEQ ID NO: 199 - protein, 1307 aa, Artificial Sequence
  SYNTHETIC
MTQFEGFTNLYQVSKTLRFELIPQGKTLKHIQEQGFIEEDKARNDHYKELKPIIDRIYKTYADQCLQLVQLDWENLSAAIDSYRKEKTEETRNALIEEQATYRNAIHDYFIGRTDNLTDAINKRHAEIYKGLFKAELFNGKVLKQLGTVTTTEHENALLRSFDKFTTYFSGFYENRKNVFSAEDISTAIPHRIVQDNFPKFKENCHIFTRLITAVPSLREHFENVKKAIGIFVSTSIEEVFSFPFYNQLLTQTQIDLYNQLLGGISREAGTEKIKGLNEVLNLAIQKNDETAHIIASLPHRFIPLFKQILSDRNTLSFILEEFKSDEEVIQSFCKYKTLLRNENVLETAEALFNELNSIDLTHIFISHKKLETISSALCDHWDTLRNALYERRISELTGKITKSAKEKVQRSLKHEDINLQEIISAAGKELSEAFKQKTSEILSHAHAALDQPLPTTLKKQEEKEILKSQLDSLLGLYHLLDWFAVDESNEVDPEFSARLTGIKLEMEPSLSFYNKARNYATKKPYSVEKFKLNFQMPTLASGWDVNKEKNNGAILFVKNGLYYLGIMPKQKGRYKALSFEPTEKTSEGFDKMYYDYFPDAAKMIPKCSTQLKAVTAHFQTHTTPILLSNNFMEPLEITKEIYDLNNPEKEPKKFQTAYAKKTGDQKGYREALCKWIDFTRDFLSKYTKTTSIDLSSLRPSSQYKDLGEYYAELNPLLYHISFQRIAEKEIMDAVETGKLYLFQIYNKDFAKGHHGKPNLHTLYWTGLFSPENLAKTSIKLNGQAELFYRPKSRMKRMAHRLGEKMLNKKLKDQKTPIPDTLYQELYDYVNHRLSHDLSDEARALLPNVITKEVSHEIIKDRRFTSDKFFFHVPITLNYQAANSPSKFNQRVNAYLKEHPETPIIGIDRGERNLIYITVIDSTGKILEQRSLNTIQQFDYQKKLDNREKERVAARQAWSVVGTIKDLKQGYLSQVIHEIVDLMIHYQAVVVLENLNFGFKSKRTGIAEKAVYQQFEKMLIDKLNCLVLKDYPAEKVGGVLNPYQLTDQFTSFAKMGTQSGFLFYVPAPYTSKIDPLTGFVDPFVWKTIKNHESRKHFLEGFDFLHYDVKTGDFILHFKMNRNLSFQRGLPGFMPAWDIVFEKNETQFDAKGTPFIAGKRIVPVIENHRFTGRYRDLYPANELIALLEEKGIVFRDGSNILPKLLENDDSHAIDTMVALIRSVLQMRNSNAATGEDYINSPVRDLNGVCFDSRFQNPEWPMDADANGAYHIALKGQLLLNHLKESKDLKLQNGISNQDWLAYIQELRN

SEQ ID NO: 200 - protein, 1307 aa, Artificial Sequence
  SYNTHETIC
MTQFEGFTNLYQVSKTLRFELIPQGKTLKHIQEQGFIEEDKARNDHYKELKPIIDRIYKTYADQCLQLVQLDWENLSAAIDSYRKEKTEETRNALIEEQATYRNAIHDYFIGRTDNLTDAINKRHAEIYKGLFKAELFNGKVLKQLGTVTTTEHENALLRSFDKFTTYFSGFYENRKNVFSAEDISTAIPHRIVQDNFPKFKENCHIFTRLITAVPSLREHFENVKKAIGIFVSTSIEEVFSFPFYNQLLTQTQIDLYNQLLGGISREAGTEKIKGLNEVLNLAIQKNDETAHIIASLPHRFIPLFKQILSDRNTLSFILEEFKSDEEVIQSFCKYKTLLRNENVLETAEALFNELNSIDLTHIFISHKKLETISSALCDHWDTLRNALYERRISELTGKITKSAKEKVQRSLKHEDINLQEIISAAGKELSEAFKQKTSEILSHAHAALDQPLPTTLKKQEEKEILKSQLDSLLGLYHLLDWFAVDESNEVDPEFSARLTGIKLEMEPSLSFYNKARNYATKKPYSVEKFKLNFQMPTLASGWDVNKEKNNGAILFVKNGLYYLGIMPKQKGRYKALSFEPTEKTSEGFDKMYYDYFPDAAKMIPKCSTQLKAVTAHFQTHTTPILLSNNFSEPLEITKEIYDLNNPEKEPKKFQTAYAKKTGDQKGYREALCKWIDFTRDFLSKYTKTTSIDLSSLRPSSQYKDLGEYYAELNPLLYHISFQRIAEKEIMDAVETGKLYLFQIYNKDFAKGHHGKPNLHTLYWTGLFSPENLAKTSIKLNGQAELFYRPKSRMKRMAHRLGEKMLNKKLKDQKTPIPDTLYQELYDYVNHRLSHDLSDEARALLPNVITKEVSHEIIKDRRFTSDKFFFHVPITLNYQAANSPSKFNQRVNAYLKEHPETPIIGIDRGERNLIYITVIDSTGKILEQRSLNTIQQFDYQKKLDNREKERVAARQAWSVVGTIKDLKQGYLSQVIHEIVDLMIHYQAVVVLENLNFGFKSKRTGIAEKAVYQQFEKMLIDKLNCLVLKDYPAEKVGGVLNPYQLTDQFTSFAKMGTQSGFLFYVPAPYTSKIDPLTGFVDPFVWKTIKNHESRKHFLEGFDFLHYDVKTGDFILHFKMNRNLSFQRGLPGFMPAWDIVFEKNETQFDAKGTPFIAGKRIVPVIENHRFTGRYRDLYPANELIALLEEKGIVFRDGSNILPKLLENDDSHAIDTMVALIRSVLQMRNSNAATGEDYINSPVRDLNGVCFDSRFQNPEWPMDADANGAYHIALKGQLLLNHLKESKDLKLQNGISNQDWLAYIQELRN

SEQ ID NO: 201 - protein, 1307 aa, Artificial Sequence
  SYNTHETIC
MTQFEGFTNLYQVSKTLRFELIPQGKTLKHIQEQGFIEEDKARNDHYKELKPIIDRIYKTYADQCLQLVQLDWENLSAAIDSYRKEKTEETRNALIEEQATYRNAIHDYFIGRTDNLTDAINKRHAEIYKGLFKAELFNGKVLKQLGTVTTTEHENALLRSFDKFTTYFSGFYENRKNVFSAEDISTAIPHRIVQDNFPKFKENCHIFTRLITAVPSLREHFENVKKAIGIFVSTSIEEVFSFPFYNQLLTQTQIDLYNQLLGGISREAGTEKIKGLNEVLNLAIQKNDETAHIIASLPHRFIPLFKQILSDRNTLSFILEEFKSDEEVIQSFCKYKTLLRNENVLETAEALFNELNSIDLTHIFISHKKLETISSALCDHWDTLRNALYERRISELTGKITKSAKEKVQRSLKHEDINLQEIISAAGKELSEAFKQKTSEILSHAHAALDQPLPTTLKKQEEKEILKSQLDSLLGLYHLLDWFAVDESNEVDPEFSARLTGIKLEMEPSLSFYNKARNYATKKPYSVEKFKLNFQMPTLASGWDVNKEKNNGAILFVKNGLYYLGIMPKQKGRYKALSFEPTEKTSEGFDKMYYDYFPDAAKMIPKCSTQLKAVTAHFQTHTTPILLSNNFINPLEITKEIYDLNNPEKEPKKFQTAYAKKTGDQKGYREALCKWIDFTRDFLSKYTKTTSIDLSSLRPSSQYKDLGEYYAELNPLLYHISFQRIAEKEIMDAVETGKLYLFQIYNKDFAKGHHGKPNLHTLYWTGLFSPENLAKTSIKLNGQAELFYRPKSRMKRMAHRLGEKMLNKKLKDQKTPIPDTLYQELYDYVNHRLSHDLSDEARALLPNVITKEVSHEIIKDRRFTSDKFFFHVPITLNYQAANSPSKFNQRVNAYLKEHPETPIIGIDRGERNLIYITVIDSTGKILEQRSLNTIQQFDYQKKLDNREKERVAARQAWSVVGTIKDLKQGYLSQVIHEIVDLMIHYQAVVVLENLNFGFKSKRTGIAEKAVYQQFEKMLIDKLNCLVLKDYPAEKVGGVLNPYQLTDQFTSFAKMGTQSGFLFYVPAPYTSKIDPLTGFVDPFVWKTIKNHESRKHFLEGFDFLHYDVKTGDFILHFKMNRNLSFQRGLPGFMPAWDIVFEKNETQFDAKGTPFIAGKRIVPVIENHRFTGRYRDLYPANELIALLEEKGIVFRDGSNILPKLLENDDSHAIDTMVALIRSVLQMRNSNAATGEDYINSPVRDLNGVCFDSRFQNPEWPMDADANGAYHIALKGQLLLNHLKESKDLKLQNGISNQDWLAYIQELRN

SEQ ID NO: 202 - protein, 1307 aa, Artificial Sequence
  SYNTHETIC
MTQFEGFTNLYQVSKTLRFELIPQGKTLKHIQEQGFIEEDKARNDHYKELKPIIDRIYKTYADQCLQLVQLDWENLSAAIDSYRKEKTEETRNALIEEQATYRNAIHDYFIGRTDNLTDAINKRHAEIYKGLFKAELFNGKVLKQLGTVTTTEHENALLRSFDKFTTYFSGFYENRKNVFSAEDISTAIPHRIVQDNFPKFKENCHIFTRLITAVPSLREHFENVKKAIGIFVSTSIEEVFSFPFYNQLLTQTQIDLYNQLLGGISREAGTEKIKGLNEVLNLAIQKNDETAHIIASLPHRFIPLFKQILSDRNTLSFILEEFKSDEEVIQSFCKYKTLLRNENVLETAEALFNELNSIDLTHIFISHKKLETISSALCDHWDTLRNALYERRISELTGKITKSAKEKVQRSLKHEDINLQEIISAAGKELSEAFKQKTSEILSHAHAALDQPLPTTLKKQEEKEILKSQLDSLLGLYHLLDWFAVDESNEVDPEFSARLTGIKLEMEPSLSFYNKARNYATKKPYSVEKFKLNFQMPTLASGWDVNKEKNNGAILFVKNGLYYLGIMPKQKGRYKALSFEPTEKTSEGFDKMYYDYFPDAAKMIPKCSTQLKAVTAHFQTHTTPILLSNNFIEALEITKEIYDLNNPEKEPKKFQTAYAKKTGDQKGYREALCKWIDFTRDFLSKYTKTTSIDLSSLRPSSQYKDLGEYYAELNPLLYHISFQRIAEKEIMDAVETGKLYLFQIYNKDFAKGHHGKPNLHTLYWTGLFSPENLAKTSIKLNGQAELFYRPKSRMKRMAHRLGEKMLNKKLKDQKTPIPDTLYQELYDYVNHRLSHDLSDEARALLPNVITKEVSHEIIKDRRFTSDKFFFHVPITLNYQAANSPSKFNQRVNAYLKEHPETPIIGIDRGERNLIYITVIDSTGKILEQRSLNTIQQFDYQKKLDNREKERVAARQAWSVVGTIKDLKQGYLSQVIHEIVDLMIHYQAVVVLENLNFGFKSKRTGIAEKAVYQQFEKMLIDKLNCLVLKDYPAEKVGGVLNPYQLTDQFTSFAKMGTQSGFLFYVPAPYTSKIDPLTGFVDPFVWKTIKNHESRKHFLEGFDFLHYDVKTGDFILHFKMNRNLSFQRGLPGFMPAWDIVFEKNETQFDAKGTPFIAGKRIVPVIENHRFTGRYRDLYPANELIALLEEKGIVFRDGSNILPKLLENDDSHAIDTMVALIRSVLQMRNSNAATGEDYINSPVRDLNGVCFDSRFQNPEWPMDADANGAYHIALKGQLLLNHLKESKDLKLQNGISNQDWLAYIQELRN

SEQ ID NO: 203 - protein, 1307 aa, Artificial Sequence
  SYNTHETIC
MTQFEGFTNLYQVSKTLRFELIPQGKTLKHIQEQGFIEEDKARNDHYKELKPIIDRIYKTYADQCLQLVQLDWENLSAAIDSYRKEKTEETRNALIEEQATYRNAIHDYFIGRTDNLTDAINKRHAEIYKGLFKAELFNGKVLKQLGTVTTTEHENALLRSFDKFTTYFSGFYENRKNVFSAEDISTAIPHRIVQDNFPKFKENCHIFTRLITAVPSLREHFENVKKAIGIFVSTSIEEVFSFPFYNQLLTQTQIDLYNQLLGGISREAGTEKIKGLNEVLNLAIQKNDETAHIIASLPHRFIPLFKQILSDRNTLSFILEEFKSDEEVIQSFCKYKTLLRNENVLETAEALFNELNSIDLTHIFISHKKLETISSALCDHWDTLRNALYERRISELTGKITKSAKEKVQRSLKHEDINLQEIISAAGKELSEAFKQKTSEILSHAHAALDQPLPTTLKKQEEKEILKSQLDSLLGLYHLLDWFAVDESNEVDPEFSARLTGIKLEMEPSLSFYNKARNYATKKPYSVEKFKLNFQMPTLASGWDVNKEKNNGAILFVKNGLYYLGIMPKQKGRYKALSFEPTEKTSEGFDKMYYDYFPDAAKMIPKCSTQLKAVTAHFQTHTTPILLSNNFIEDLEITKEIYDLNNPEKEPKKFQTAYAKKTGDQKGYREALCKWIDFTRDFLSKYTKTTSIDLSSLRPSSQYKDLGEYYAELNPLLYHISFQRIAEKEIMDAVETGKLYLFQIYNKDFAKGHHGKPNLHTLYWTGLFSPENLAKTSIKLNGQAELFYRPKSRMKRMAHRLGEKMLNKKLKDQKTPIPDTLYQELYDYVNHRLSHDLSDEARALLPNVITKEVSHEIIKDRRFTSDKFFFHVPITLNYQAANSPSKFNQRVNAYLKEHPETPIIGIDRGERNLIYITVIDSTGKILEQRSLNTIQQFDYQKKLDNREKERVAARQAWSVVGTIKDLKQGYLSQVIHEIVDLMIHYQAVVVLENLNFGFKSKRTGIAEKAVYQQFEKMLIDKLNCLVLKDYPAEKVGGVLNPYQLTDQFTSFAKMGTQSGFLFYVPAPYTSKIDPLTGFVDPFVWKTIKNHESRKHFLEGFDFLHYDVKTGDFILHFKMNRNLSFQRGLPGFMPAWDIVFEKNETQFDAKGTPFIAGKRIVPVIENHRFTGRYRDLYPANELIALLEEKGIVFRDGSNILPKLLENDDSHAIDTMVALIRSVLQMRNSNAATGEDYINSPVRDLNGVCFDSRFQNPEWPMDADANGAYHIALKGQLLLNHLKESKDLKLQNGISNQDWLAYIQELRN

SEQ ID NO: 204 - protein, 1307 aa, Artificial Sequence
  SYNTHETIC
MTQFEGFTNLYQVSKTLRFELIPQGKTLKHIQEQGFIEEDKARNDHYKELKPIIDRIYKTYADQCLQLVQLDWENLSAAIDSYRKEKTEETRNALIEEQATYRNAIHDYFIGRTDNLTDAINKRHAEIYKGLFKAELFNGKVLKQLGTVTTTEHENALLRSFDKFTTYFSGFYENRKNVFSAEDISTAIPHRIVQDNFPKFKENCHIFTRLITAVPSLREHFENVKKAIGIFVSTSIEEVFSFPFYNQLLTQTQIDLYNQLLGGISREAGTEKIKGLNEVLNLAIQKNDETAHIIASLPHRFIPLFKQILSDRNTLSFILEEFKSDEEVIQSFCKYKTLLRNENVLETAEALFNELNSIDLTHIFISHKKLETISSALCDHWDTLRNALYERRISELTGKITKSAKEKVQRSLKHEDINLQEIISAAGKELSEAFKQKTSEILSHAHAALDQPLPTTLKKQEEKEILKSQLDSLLGLYHLLDWFAVDESNEVDPEFSARLTGIKLEMEPSLSFYNKARNYATKKPYSVEKFKLNFQMPTLASGWDVNKEKNNGAILFVKNGLYYLGIMPKQKGRYKALSFEPTEKTSEGFDKMYYDYFPDAAKMIPKCSTQLKAVTAHFQTHTTPILLSNNFIEELEITKEIYDLNNPEKEPKKFQTAYAKKTGDQKGYREALCKWIDFTRDFLSKYTKTTSIDLSSLRPSSQYKDLGEYYAELNPLLYHISFQRIAEKEIMDAVETGKLYLFQIYNKDFAKGHHGKPNLHTLYWTGLFSPENLAKTSIKLNGQAELFYRPKSRMKRMAHRLGEKMLNKKLKDQKTPIPDTLYQELYDYVNHRLSHDLSDEARALLPNVITKEVSHEIIKDRRFTSDKFFFHVPITLNYQAANSPSKFNQRVNAYLKEHPETPIIGIDRGERNLIYITVIDSTGKILEQRSLNTIQQFDYQKKLDNREKERVAARQAWSVVGTIKDLKQGYLSQVIHEIVDLMIHYQAVVVLENLNFGFKSKRTGIAEKAVYQQFEKMLIDKLNCLVLKDYPAEKVGGVLNPYQLTDQFTSFAKMGTQSGFLFYVPAPYTSKIDPLTGFVDPFVWKTIKNHESRKHFLEGFDFLHYDVKTGDFILHFKMNRNLSFQRGLPGFMPAWDIVFEKNETQFDAKGTPFIAGKRIVPVIENHRFTGRYRDLYPANELIALLEEKGIVFRDGSNILPKLLENDDSHAIDTMVALIRSVLQMRNSNAATGEDYINSPVRDLNGVCFDSRFQNPEWPMDADANGAYHIALKGQLLLNHLKESKDLKLQNGISNQDWLAYIQELRN

SEQ ID NO: 205 - protein, 1307 aa, Artificial Sequence
  SYNTHETIC
MTQFEGFTNLYQVSKTLRFELIPQGKTLKHIQEQGFIEEDKARNDHYKELKPIIDRIYKTYADQCLQLVQLDWENLSAAIDSYRKEKTEETRNALIEEQATYRNAIHDYFIGRTDNLTDAINKRHAEIYKGLFKAELFNGKVLKQLGTVTTTEHENALLRSFDKFTTYFSGFYENRKNVFSAEDISTAIPHRIVQDNFPKFKENCHIFTRLITAVPSLREHFENVKKAIGIFVSTSIEEVFSFPFYNQLLTQTQIDLYNQLLGGISREAGTEKIKGLNEVLNLAIQKNDETAHIIASLPHRFIPLFKQILSDRNTLSFILEEFKSDEEVIQSFCKYKTLLRNENVLETAEALFNELNSIDLTHIFISHKKLETISSALCDHWDTLRNALYERRISELTGKITKSAKEKVQRSLKHEDINLQEIISAAGKELSEAFKQKTSEILSHAHAALDQPLPTTLKKQEEKEILKSQLDSLLGLYHLLDWFAVDESNEVDPEFSARLTGIKLEMEPSLSFYNKARNYATKKPYSVEKFKLNFQMPTLASGWDVNKEKNNGAILFVKNGLYYLGIMPKQKGRYKALSFEPTEKTSEGFDKMYYDYFPDAAKMIPKCSTQLKAVTAHFQTHTTPILLSNNFIETLEITKEIYDLNNPEKEPKKFQTAYAKKTGDQKGYREALCKWIDFTRDFLSKYTKTTSIDLSSLRPSSQYKDLGEYYAELNPLLYHISFQRIAEKEIMDAVETGKLYLFQIYNKDFAKGHHGKPNLHTLYWTGLFSPENLAKTSIKLNGQAELFYRPKSRMKRMAHRLGEKMLNKKLKDQKTPIPDTLYQELYDYVNHRLSHDLSDEARALLPNVITKEVSHEIIKDRRFTSDKFFFHVPITLNYQAANSPSKFNQRVNAYLKEHPETPIIGIDRGERNLIYITVIDSTGKILEQRSLNTIQQFDYQKKLDNREKERVAARQAWSVVGTIKDLKQGYLSQVIHEIVDLMIHYQAVVVLENLNFGFKSKRTGIAEKAVYQQFEKMLIDKLNCLVLKDYPAEKVGGVLNPYQLTDQFTSFAKMGTQSGFLFYVPAPYTSKIDPLTGFVDPFVWKTIKNHESRKHFLEGFDFLHYDVKTGDFILHFKMNRNLSFQRGLPGFMPAWDIVFEKNETQFDAKGTPFIAGKRIVPVIENHRFTGRYRDLYPANELIALLEEKGIVFRDGSNILPKLLENDDSHAIDTMVALIRSVLQMRNSNAATGEDYINSPVRDLNGVCFDSRFQNPEWPMDADANGAYHIALKGQLLLNHLKESKDLKLQNGISNQDWLAYIQELRN

SEQ ID NO: 206 - protein, 1307 aa, Artificial Sequence
  SYNTHETIC
MTQFEGFTNLYQVSKTLRFELIPQGKTLKHIQEQGFIEEDKARNDHYKELKPIIDRIYKTYADQCLQLVQLDWENLSAAIDSYRKEKTEETRNALIEEQATYRNAIHDYFIGRTDNLTDAINKRHAEIYKGLFKAELFNGKVLKQLGTVTTTEHENALLRSFDKFTTYFSGFYENRKNVFSAEDISTAIPHRIVQDNFPKFKENCHIFTRLITAVPSLREHFENVKKAIGIFVSTSIEEVFSFPFYNQLLTQTQIDLYNQLLGGISREAGTEKIKGLNEVLNLAIQKNDETAHIIASLPHRFIPLFKQILSDRNTLSFILEEFKSDEEVIQSFCKYKTLLRNENVLETAEALFNELNSIDLTHIFISHKKLETISSALCDHWDTLRNALYERRISELTGKITKSAKEKVQRSLKHEDINLQEIISAAGKELSEAFKQKTSEILSHAHAALDQPLPTTLKKQEEKEILKSQLDSLLGLYHLLDWFAVDESNEVDPEFSARLTGIKLEMEPSLSFYNKARNYATKKPYSVEKFKLNFQMPTLASGWDVNKEKNNGAILFVKNGLYYLGIMPKQKGRYKALSFEPTEKTSEGFDKMYYDYFPDAAKMIPKCSTQLKAVTAHFQTHTTPILLSNNFIEPLEIGKEIYDLNNPEKEPKKFQTAYAKKTGDQKGYREALCKWIDFTRDFLSKYTKTTSIDLSSLRPSSQYKDLGEYYAELNPLLYHISFQRIAEKEIMDAVETGKLYLFQIYNKDFAKGHHGKPNLHTLYWTGLFSPENLAKTSIKLNGQAELFYRPKSRMKRMAHRLGEKMLNKKLKDQKTPIPDTLYQELYDYVNHRLSHDLSDEARALLPNVITKEVSHEIIKDRRFTSDKFFFHVPITLNYQAANSPSKFNQRVNAYLKEHPETPIIGIDRGERNLIYITVIDSTGKILEQRSLNTIQQFDYQKKLDNREKERVAARQAWSVVGTIKDLKQGYLSQVIHEIVDLMIHYQAVVVLENLNFGFKSKRTGIAEKAVYQQFEKMLIDKLNCLVLKDYPAEKVGGVLNPYQLTDQFTSFAKMGTQSGFLFYVPAPYTSKIDPLTGFVDPFVWKTIKNHESRKHFLEGFDFLHYDVKTGDFILHFKMNRNLSFQRGLPGFMPAWDIVFEKNETQFDAKGTPFIAGKRIVPVIENHRFTGRYRDLYPANELIALLEEKGIVFRDGSNILPKLLENDDSHAIDTMVALIRSVLQMRNSNAATGEDYINSPVRDLNGVCFDSRFQNPEWPMDADANGAYHIALKGQLLLNHLKESKDLKLQNGISNQDWLAYIQELRN

SEQ ID NO: 207 - protein, 1307 aa, Artificial Sequence
  SYNTHETIC
MTQFEGFTNLYQVSKTLRFELIPQGKTLKHIQEQGFIEEDKARNDHYKELKPIIDRIYKTYADQCLQLVQLDWENLSAAIDSYRKEKTEETRNALIEEQATYRNAIHDYFIGRTDNLTDAINKRHAEIYKGLFKAELFNGKVLKQLGTVTTTEHENALLRSFDKFTTYFSGFYENRKNVFSAEDISTAIPHRIVQDNFPKFKENCHIFTRLITAVPSLREHFENVKKAIGIFVSTSIEEVFSFPFYNQLLTQTQIDLYNQLLGGISREAGTEKIKGLNEVLNLAIQKNDETAHIIASLPHRFIPLFKQILSDRNTLSFILEEFKSDEEVIQSFCKYKTLLRNENVLETAEALFNELNSIDLTHIFISHKKLETISSALCDHWDTLRNALYERRISELTGKITKSAKEKVQRSLKHEDINLQEIISAAGKELSEAFKQKTSEILSHAHAALDQPLPTTLKKQEEKEILKSQLDSLLGLYHLLDWFAVDESNEVDPEFSARLTGIKLEMEPSLSFYNKARNYATKKPYSVEKFKLNFQMPTLASGWDVNKEKNNGAILFVKNGLYYLGIMPKQKGRYKALSFEPTEKTSEGFDKMYYDYFPDAAKMIPKCSTQLKAVTAHFQTHTTPILLSNNFIEPLEITKEIYDLNNPEKEPKKFQTAYAKKTGDQKGYREALCKWIDFTRDFLSKYTKTTSIDLSSLRPSSQYKDLGEYYAELNPLLYHISFQRIAEKEIMDAVETGKLYLFQIYNKDFAKGHHGKPNLHTLYWTGLFSPENLAKTSIKLNGQAELFYRPKSRMKRMAHRLGEKMLNKKLKDQKTPIPDTLYQELYDYVNHRLSHDLSSEARALLPNVITKEVSHEIIKDRRFTSDKFFFHVPITLNYQAANSPSKFNQRVNAYLKEHPETPIIGIDRGERNLIYITVIDSTGKILEQRSLNTIQQFDYQKKLDNREKERVAARQAWSVVGTIKDLKQGYLSQVIHEIVDLMIHYQAVVVLENLNFGFKSKRTGIAEKAVYQQFEKMLIDKLNCLVLKDYPAEKVGGVLNPYQLTDQFTSFAKMGTQSGFLFYVPAPYTSKIDPLTGFVDPFVWKTIKNHESRKHFLEGFDFLHYDVKTGDFILHFKMNRNLSFQRGLPGFMPAWDIVFEKNETQFDAKGTPFIAGKRIVPVIENHRFTGRYRDLYPANELIALLEEKGIVFRDGSNILPKLLENDDSHAIDTMVALIRSVLQMRNSNAATGEDYINSPVRDLNGVCFDSRFQNPEWPMDADANGAYHIALKGQLLLNHLKESKDLKLQNGISNQDWLAYIQELRN

SEQ ID NO: 208 - protein, 1307 aa, Artificial Sequence
  SYNTHETIC
MTQFEGFTNLYQVSKTLRFELIPQGKTLKHIQEQGFIEEDKARNDHYKELKPIIDRIYKTYADQCLQLVQLDWENLSAAIDSYRKEKTEETRNALIEEQATYRNAIHDYFIGRTDNLTDAINKRHAEIYKGLFKAELFNGKVLKQLGTVTTTEHENALLRSFDKFTTYFSGFYENRKNVFSAEDISTAIPHRIVQDNFPKFKENCHIFTRLITAVPSLREHFENVKKAIGIFVSTSIEEVFSFPFYNQLLTQTQIDLYNQLLGGISREAGTEKIKGLNEVLNLAIQKNDETAHIIASLPHRFIPLFKQILSDRNTLSFILEEFKSDEEVIQSFCKYKTLLRNENVLETAEALFNELNSIDLTHIFISHKKLETISSALCDHWDTLRNALYERRISELTGKITKSAKEKVQRSLKHEDINLQEIISAAGKELSEAFKQKTSEILSHAHAALDQPLPTTLKKQEEKEILKSQLDSLLGLYHLLDWFAVDESNEVDPEFSARLTGIKLEMEPSLSFYNKARNYATKKPYSVEKFKLNFQMPTLASGWDVNKEKNNGAILFVKNGLYYLGIMPKQKGRYKALSFEPTEKTSEGFDKMYYDYFPDAAKMIPKCSTQLKAVTAHFQTHTTPILLSNNFIEPLEITKEIYDLNNPEKEPKKFQTAYAKKTGDQKGYREALCKWIDFTRDFLSKYTKTTSIDLSSLRPSSQYKDLGEYYAELNPLLYHISFQRIAEKEIMDAVETGKLYLFQIYNKDFAKGHHGKPNLHTLYWTGLFSPENLAKTSIKLNGQAELFYRPKSRMKRMAHRLGEKMLNKKLKDQKTPIPDTLYQELYDYVNHRLSHDLSDESRALLPNVITKEVSHEIIKDRRFTSDKFFFHVPITLNYQAANSPSKFNQRVNAYLKEHPETPIIGIDRGERNLIYITVIDSTGKILEQRSLNTIQQFDYQKKLDNREKERVAARQAWSVVGTIKDLKQGYLSQVIHEIVDLMIHYQAVVVLENLNFGFKSKRTGIAEKAVYQQFEKMLIDKLNCLVLKDYPAEKVGGVLNPYQLTDQFTSFAKMGTQSGFLFYVPAPYTSKIDPLTGFVDPFVWKTIKNHESRKHFLEGFDFLHYDVKTGDFILHFKMNRNLSFQRGLPGFMPAWDIVFEKNETQFDAKGTPFIAGKRIVPVIENHRFTGRYRDLYPANELIALLEEKGIVFRDGSNILPKLLENDDSHAIDTMVALIRSVLQMRNSNAATGEDYINSPVRDLNGVCFDSRFQNPEWPMDADANGAYHIALKGQLLLNHLKESKDLKLQNGISNQDWLAYIQELRN

SEQ ID NO: 209 - protein, 1307 aa, Artificial Sequence
  SYNTHETIC
MTQFEGFTNLYQVSKTLRFELIPQGKTLKHIQEQGFIEEDKARNDHYKELKPIIDRIYKTYADQCLQLVQLDWENLSAAIDSYRKEKTEETRNALIEEQATYRNAIHDYFIGRTDNLTDAINKRHAEIYKGLFKAELFNGKVLKQLGTVTTTEHENALLRSFDKFTTYFSGFYENRKNVFSAEDISTAIPHRIVQDNFPKFKENCHIFTRLITAVPSLREHFENVKKAIGIFVSTSIEEVFSFPFYNQLLTQTQIDLYNQLLGGISREAGTEKIKGLNEVLNLAIQKNDETAHIIASLPHRFIPLFKQILSDRNTLSFILEEFKSDEEVIQSFCKYKTLLRNENVLETAEALFNELNSIDLTHIFISHKKLETISSALCDHWDTLRNALYERRISELTGKITKSAKEKVQRSLKHEDINLQEIISAAGKELSEAFKQKTSEILSHAHAALDQPLPTTLKKQEEKEILKSQLDSLLGLYHLLDWFAVDESNEVDPEFSARLTGIKLEMEPSLSFYNKARNYATKKPYSVEKFKLNFQMPTLASGWDVNKEKNNGAILFVKNGLYYLGIMPKQKGRYKALSFEPTEKTSEGFDKMYYDYFPDAAKMIPKCSTQLKAVTAHFQTHTTPILLSNNFIEPLEITKEIYDLNNPEKEPKKFQTAYAKKTGDQKGYREALCKWIDFTRDFLSKYTKTTSIDLSSLRPSSQYKDLGEYYAELNPLLYHISFQRIAEKEIMDAVETGKLYLFQIYNKDFAKGHHGKPNLHTLYWTGLFSPENLAKTSIKLNGQAELFYRPKSRMKRMAHRLGEKMLNKKLKDQKTPIPDTLYQELYDYVNHRLSHDLSDEARELLPNVITKEVSHEIIKDRRFTSDKFFFHVPITLNYQAANSPSKFNQRVNAYLKEHPETPIIGIDRGERNLIYITVIDSTGKILEQRSLNTIQQFDYQKKLDNREKERVAARQAWSVVGTIKDLKQGYLSQVIHEIVDLMIHYQAVVVLENLNFGFKSKRTGIAEKAVYQQFEKMLIDKLNCLVLKDYPAEKVGGVLNPYQLTDQFTSFAKMGTQSGFLFYVPAPYTSKIDPLTGFVDPFVWKTIKNHESRKHFLEGFDFLHYDVKTGDFILHFKMNRNLSFQRGLPGFMPAWDIVFEKNETQFDAKGTPFIAGKRIVPVIENHRFTGRYRDLYPANELIALLEEKGIVFRDGSNILPKLLENDDSHAIDTMVALIRSVLQMRNSNAATGEDYINSPVRDLNGVCFDSRFQNPEWPMDADANGAYHIALKGQLLLNHLKESKDLKLQNGISNQDWLAYIQELRN

SEQ ID NO: 210 - protein, 1307 aa, Artificial Sequence
  SYNTHETIC
MTQFEGFTNLYQVSKTLRFELIPQGKTLKHIQEQGFIEEDKARNDHYKELKPIIDRIYKTYADQCLQLVQLDWENLSAAIDSYRKEKTEETRNALIEEQATYRNAIHDYFIGRTDNLTDAINKRHAEIYKGLFKAELFNGKVLKQLGTVTTTEHENALLRSFDKFTTYFSGFYENRKNVFSAEDISTAIPHRIVQDNFPKFKENCHIFTRLITAVPSLREHFENVKKAIGIFVSTSIEEVFSFPFYNQLLTQTQIDLYNQLLGGISREAGTEKIKGLNEVLNLAIQKNDETAHIIASLPHRFIPLFKQILSDRNTLSFILEEFKSDEEVIQSFCKYKTLLRNENVLETAEALFNELNSIDLTHIFISHKKLETISSALCDHWDTLRNALYERRISELTGKITKSAKEKVQRSLKHEDINLQEIISAAGKELSEAFKQKTSEILSHAHAALDQPLPTTLKKQEEKEILKSQLDSLLGLYHLLDWFAVDESNEVDPEFSARLTGIKLEMEPSLSFYNKARNYATKKPYSVEKFKLNFQMPTLASGWDVNKEKNNGAILFVKNGLYYLGIMPKQKGRYKALSFEPTEKTSEGFDKMYYDYFPDAAKMIPKCSTQLKAVTAHFQTHTTPILLSNNFIEPLEITKEIYDLNNPEKEPKKFQTAYAKKTGDQKGYREALCKWIDFTRDFLSKYTKTTSIDLSSLRPSSQYKDLGEYYAELNPLLYHISFQRIAEKEIMDAVETGKLYLFQIYNKDFAKGHHGKPNLHTLYWTGLFSPENLAKTSIKLNGQAELFYRPKSRMKRMAHRLGEKMLNKKLKDQKTPIPDTLYQELYDYVNHRLSHDLSDEARALLPNVIAKEVSHEIIKDRRFTSDKFFFHVPITLNYQAANSPSKFNQRVNAYLKEHPETPIIGIDRGERNLIYITVIDSTGKILEQRSLNTIQQFDYQKKLDNREKERVAARQAWSVVGTIKDLKQGYLSQVIHEIVDLMIHYQAVVVLENLNFGFKSKRTGIAEKAVYQQFEKMLIDKLNCLVLKDYPAEKVGGVLNPYQLTDQFTSFAKMGTQSGFLFYVPAPYTSKIDPLTGFVDPFVWKTIKNHESRKHFLEGFDFLHYDVKTGDFILHFKMNRNLSFQRGLPGFMPAWDIVFEKNETQFDAKGTPFIAGKRIVPVIENHRFTGRYRDLYPANELIALLEEKGIVFRDGSNILPKLLENDDSHAIDTMVALIRSVLQMRNSNAATGEDYINSPVRDLNGVCFDSRFQNPEWPMDADANGAYHIALKGQLLLNHLKESKDLKLQNGISNQDWLAYIQELRN

SEQ ID NO: 211 - protein, 1307 aa, Artificial Sequence
  SYNTHETIC
MTQFEGFTNLYQVSKTLRFELIPQGKTLKHIQEQGFIEEDKARNDHYKELKPIIDRIYKTYADQCLQLVQLDWENLSAAIDSYRKEKTEETRNALIEEQATYRNAIHDYFIGRTDNLTDAINKRHAEIYKGLFKAELFNGKVLKQLGTVTTTEHENALLRSFDKFTTYFSGFYENRKNVFSAEDISTAIPHRIVQDNFPKFKENCHIFTRLITAVPSLREHFENVKKAIGIFVSTSIEEVFSFPFYNQLLTQTQIDLYNQLLGGISREAGTEKIKGLNEVLNLAIQKNDETAHIIASLPHRFIPLFKQILSDRNTLSFILEEFKSDEEVIQSFCKYKTLLRNENVLETAEALFNELNSIDLTHIFISHKKLETISSALCDHWDTLRNALYERRISELTGKITKSAKEKVQRSLKHEDINLQEIISAAGKELSEAFKQKTSEILSHAHAALDQPLPTTLKKQEEKEILKSQLDSLLGLYHLLDWFAVDESNEVDPEFSARLTGIKLEMEPSLSFYNKARNYATKKPYSVEKFKLNFQMPTLASGWDVNKEKNNGAILFVKNGLYYLGIMPKQKGRYKALSFEPTEKTSEGFDKMYYDYFPDAAKMIPKCSTQLKAVTAHFQTHTTPILLSNNFIEPLEITKEIYDLNNPEKEPKKFQTAYAKKTGDQKGYREALCKWIDFTRDFLSKYTKTTSIDLSSLRPSSQYKDLGEYYAELNPLLYHISFQRIAEKEIMDAVETGKLYLFQIYNKDFAKGHHGKPNLHTLYWTGLFSPENLAKTSIKLNGQAELFYRPKSRMKRMAHRLGEKMLNKKLKDQKTPIPDTLYQELYDYVNHRLSHDLSDEARALLPNVIVKEVSHEIIKDRRFTSDKFFFHVPITLNYQAANSPSKFNQRVNAYLKEHPETPIIGIDRGERNLIYITVIDSTGKILEQRSLNTIQQFDYQKKLDNREKERVAARQAWSVVGTIKDLKQGYLSQVIHEIVDLMIHYQAVVVLENLNFGFKSKRTGIAEKAVYQQFEKMLIDKLNCLVLKDYPAEKVGGVLNPYQLTDQFTSFAKMGTQSGFLFYVPAPYTSKIDPLTGFVDPFVWKTIKNHESRKHFLEGFDFLHYDVKTGDFILHFKMNRNLSFQRGLPGFMPAWDIVFEKNETQFDAKGTPFIAGKRIVPVIENHRFTGRYRDLYPANELIALLEEKGIVFRDGSNILPKLLENDDSHAIDTMVALIRSVLQMRNSNAATGEDYINSPVRDLNGVCFDSRFQNPEWPMDADANGAYHIALKGQLLLNHLKESKDLKLQNGISNQDWLAYIQELRN

SEQ ID NO: 212 - protein, 1307 aa, Artificial Sequence
  SYNTHETIC
MTQFEGFTNLYQVSKTLRFELIPQGKTLKHIQEQGFIEEDKARNDHYKELKPIIDRIYKTYADQCLQLVQLDWENLSAAIDSYRKEKTEETRNALIEEQATYRNAIHDYFIGRTDNLTDAINKRHAEIYKGLFKAELFNGKVLKQLGTVTTTEHENALLRSFDKFTTYFSGFYENRKNVFSAEDISTAIPHRIVQDNFPKFKENCHIFTRLITAVPSLREHFENVKKAIGIFVSTSIEEVFSFPFYNQLLTQTQIDLYNQLLGGISREAGTEKIKGLNEVLNLAIQKNDETAHIIASLPHRFIPLFKQILSDRNTLSFILEEFKSDEEVIQSFCKYKTLLRNENVLETAEALFNELNSIDLTHIFISHKKLETISSALCDHWDTLRNALYERRISELTGKITKSAKEKVQRSLKHEDINLQEIISAAGKELSEAFKQKTSEILSHAHAALDQPLPTTLKKQEEKEILKSQLDSLLGLYHLLDWFAVDESNEVDPEFSARLTGIKLEMEPSLSFYNKARNYATKKPYSVEKFKLNFQMPTLASGWDVNKEKNNGAILFVKNGLYYLGIMPKQKGRYKALSFEPTEKTSEGFDKMYYDYFPDAAKMIPKCSTQLKAVTAHFQTHTTPILLSNNFIEPLEITKEIYDLNNPEKEPKKFQTAYAKKTGDQKGYREALCKWIDFTRDFLSKYTKTTSIDLSSLRPSSQYKDLGEYYAELNPLLYHISFQRIAEKEIMDAVETGKLYLFQIYNKDFAKGHHGKPNLHTLYWTGLFSPENLAKTSIKLNGQAELFYRPKSRMKRMAHRLGEKMLNKKLKDQKTPIPDTLYQELYDYVNHRLSHDLSDEARALLPNVITKVVSHEIIKDRRFTSDKFFFHVPITLNYQAANSPSKFNQRVNAYLKEHPETPIIGIDRGERNLIYITVIDSTGKILEQRSLNTIQQFDYQKKLDNREKERVAARQAWSVVGTIKDLKQGYLSQVIHEIVDLMIHYQAVVVLENLNFGFKSKRTGIAEKAVYQQFEKMLIDKLNCLVLKDYPAEKVGGVLNPYQLTDQFTSFAKMGTQSGFLFYVPAPYTSKIDPLTGFVDPFVWKTIKNHESRKHFLEGFDFLHYDVKTGDFILHFKMNRNLSFQRGLPGFMPAWDIVFEKNETQFDAKGTPFIAGKRIVPVIENHRFTGRYRDLYPANELIALLEEKGIVFRDGSNILPKLLENDDSHAIDTMVALIRSVLQMRNSNAATGEDYINSPVRDLNGVCFDSRFQNPEWPMDADANGAYHIALKGQLLLNHLKESKDLKLQNGISNQDWLAYIQELRN

SEQ ID NO: 213 - protein, 1307 aa, Artificial Sequence
  SYNTHETIC
MTQFEGFTNLYQVSKTLRFELIPQGKTLKHIQEQGFIEEDKARNDHYKELKPIIDRIYKTYADQCLQLVQLDWENLSAAIDSYRKEKTEETRNALIEEQATYRNAIHDYFIGRTDNLTDAINKRHAEIYKGLFKAELFNGKVLKQLGTVTTTEHENALLRSFDKFTTYFSGFYENRKNVFSAEDISTAIPHRIVQDNFPKFKENCHIFTRLITAVPSLREHFENVKKAIGIFVSTSIEEVFSFPFYNQLLTQTQIDLYNQLLGGISREAGTEKIKGLNEVLNLAIQKNDETAHIIASLPHRFIPLFKQILSDRNTLSFILEEFKSDEEVIQSFCKYKTLLRNENVLETAEALFNELNSIDLTHIFISHKKLETISSALCDHWDTLRNALYERRISELTGKITKSAKEKVQRSLKHEDINLQEIISAAGKELSEAFKQKTSEILSHAHAALDQPLPTTLKKQEEKEILKSQLDSLLGLYHLLDWFAVDESNEVDPEFSARLTGIKLEMEPSLSFYNKARNYATKKPYSVEKFKLNFQMPTLASGWDVNKEKNNGAILFVKNGLYYLGIMPKQKGRYKALSFEPTEKTSEGFDKMYYDYFPDAAKMIPKCSTQLKAVTAHFQTHTTPILLSNNFIEPLEITKEIYDLNNPEKEPKKFQTAYAKKTGDQKGYREALCKWIDFTRDFLSKYTKTTSIDLSSLRPSSQYKDLGEYYAELNPLLYHISFQRIAEKEIMDAVETGKLYLFQIYNKDFAKGHHGKPNLHTLYWTGLFSPENLAKTSIKLNGQAELFYRPKSRMKRMAHRLGEKMLNKKLKDQKTPIPDTLYQELYDYVNHRLSHDLSDEARALLPNVITKEVSHEIIKDKRFTSDKFFFHVPITLNYQAANSPSKFNQRVNAYLKEHPETPIIGIDRGERNLIYITVIDSTGKILEQRSLNTIQQFDYQKKLDNREKERVAARQAWSVVGTIKDLKQGYLSQVIHEIVDLMIHYQAVVVLENLNFGFKSKRTGIAEKAVYQQFEKMLIDKLNCLVLKDYPAEKVGGVLNPYQLTDQFTSFAKMGTQSGFLFYVPAPYTSKIDPLTGFVDPFVWKTIKNHESRKHFLEGFDFLHYDVKTGDFILHFKMNRNLSFQRGLPGFMPAWDIVFEKNETQFDAKGTPFIAGKRIVPVIENHRFTGRYRDLYPANELIALLEEKGIVFRDGSNILPKLLENDDSHAIDTMVALIRSVLQMRNSNAATGEDYINSPVRDLNGVCFDSRFQNPEWPMDADANGAYHIALKGQLLLNHLKESKDLKLQNGISNQDWLAYIQELRN

SEQ ID NO: 214 - protein, 1307 aa, Artificial Sequence
  SYNTHETIC
MTQFEGFTNLYQVSKTLRFELIPQGKTLKHIQEQGFIEEDKARNDHYKELKPIIDRIYKTYADQCLQLVQLDWENLSAAIDSYRKEKTEETRNALIEEQATYRNAIHDYFIGRTDNLTDAINKRHAEIYKGLFKAELFNGKVLKQLGTVTTTEHENALLRSFDKFTTYFSGFYENRKNVFSAEDISTAIPHRIVQDNFPKFKENCHIFTRLITAVPSLREHFENVKKAIGIFVSTSIEEVFSFPFYNQLLTQTQIDLYNQLLGGISREAGTEKIKGLNEVLNLAIQKNDETAHIIASLPHRFIPLFKQILSDRNTLSFILEEFKSDEEVIQSFCKYKTLLRNENVLETAEALFNELNSIDLTHIFISHKKLETISSALCDHWDTLRNALYERRISELTGKITKSAKEKVQRSLKHEDINLQEIISAAGKELSEAFKQKTSEILSHAHAALDQPLPTTLKKQEEKEILKSQLDSLLGLYHLLDWFAVDESNEVDPEFSARLTGIKLEMEPSLSFYNKARNYATKKPYSVEKFKLNFQMPTLASGWDVNKEKNNGAILFVKNGLYYLGIMPKQKGRYKALSFEPTEKTSEGFDKMYYDYFPDAAKMIPKCSTQLKAVTAHFQTHTTPILLSNNFIEPLEITKEIYDLNNPEKEPKKFQTAYAKKTGDQKGYREALCKWIDFTRDFLSKYTKTTSIDLSSLRPSSQYKDLGEYYAELNPLLYHISFQRIAEKEIMDAVETGKLYLFQIYNKDFAKGHHGKPNLHTLYWTGLFSPENLAKTSIKLNGQAELFYRPKSRMKRMAHRLGEKMLNKKLKDQKTPIPDTLYQELYDYVNHRLSHDLSDEARALLPNVITKEVSHEIIKDRRFTFDKFFFHVPITLNYQAANSPSKFNQRVNAYLKEHPETPIIGIDRGERNLIYITVIDSTGKILEQRSLNTIQQFDYQKKLDNREKERVAARQAWSVVGTIKDLKQGYLSQVIHEIVDLMIHYQAVVVLENLNFGFKSKRTGIAEKAVYQQFEKMLIDKLNCLVLKDYPAEKVGGVLNPYQLTDQFTSFAKMGTQSGFLFYVPAPYTSKIDPLTGFVDPFVWKTIKNHESRKHFLEGFDFLHYDVKTGDFILHFKMNRNLSFQRGLPGFMPAWDIVFEKNETQFDAKGTPFIAGKRIVPVIENHRFTGRYRDLYPANELIALLEEKGIVFRDGSNILPKLLENDDSHAIDTMVALIRSVLQMRNSNAATGEDYINSPVRDLNGVCFDSRFQNPEWPMDADANGAYHIALKGQLLLNHLKESKDLKLQNGISNQDWLAYIQELRN

SEQ ID NO: 215 - protein, 1307 aa, Artificial Sequence
  SYNTHETIC
MTQFEGFTNLYQVSKTLRFELIPQGKTLKHIQEQGFIEEDKARNDHYKELKPIIDRIYKTYADQCLQLVQLDWENLSAAIDSYRKEKTEETRNALIEEQATYRNAIHDYFIGRTDNLTDAINKRHAEIYKGLFKAELFNGKVLKQLGTVTTTEHENALLRSFDKFTTYFSGFYENRKNVFSAEDISTAIPHRIVQDNFPKFKENCHIFTRLITAVPSLREHFENVKKAIGIFVSTSIEEVFSFPFYNQLLTQTQIDLYNQLLGGISREAGTEKIKGLNEVLNLAIQKNDETAHIIASLPHRFIPLFKQILSDRNTLSFILEEFKSDEEVIQSFCKYKTLLRNENVLETAEALFNELNSIDLTHIFISHKKLETISSALCDHWDTLRNALYERRISELTGKITKSAKEKVQRSLKHEDINLQEIISAAGKELSEAFKQKTSEILSHAHAALDQPLPTTLKKQEEKEILKSQLDSLLGLYHLLDWFAVDESNEVDPEFSARLTGIKLEMEPSLSFYNKARNYATKKPYSVEKFKLNFQMPTLASGWDVNKEKNNGAILFVKNGLYYLGIMPKQKGRYKALSFEPTEKTSEGFDKMYYDYFPDAAKMIPKCSTQLKAVTAHFQTHTTPILLSNNFIEPLEITKEIYDLNNPEKEPKKFQTAYAKKTGDQKGYREALCKWIDFTRDFLSKYTKTTSIDLSSLRPSSQYKDLGEYYAELNPLLYHISFQRIAEKEIMDAVETGKLYLFQIYNKDFAKGHHGKPNLHTLYWTGLFSPENLAKTSIKLNGQAELFYRPKSRMKRMAHRLGEKMLNKKLKDQKTPIPDTLYQELYDYVNHRLSHDLSDEARALLPNVITKEVSHEIIKDRRFTTDKFFFHVPITLNYQAANSPSKFNQRVNAYLKEHPETPIIGIDRGERNLIYITVIDSTGKILEQRSLNTIQQFDYQKKLDNREKERVAARQAWSVVGTIKDLKQGYLSQVIHEIVDLMIHYQAVVVLENLNFGFKSKRTGIAEKAVYQQFEKMLIDKLNCLVLKDYPAEKVGGVLNPYQLTDQFTSFAKMGTQSGFLFYVPAPYTSKIDPLTGFVDPFVWKTIKNHESRKHFLEGFDFLHYDVKTGDFILHFKMNRNLSFQRGLPGFMPAWDIVFEKNETQFDAKGTPFIAGKRIVPVIENHRFTGRYRDLYPANELIALLEEKGIVFRDGSNILPKLLENDDSHAIDTMVALIRSVLQMRNSNAATGEDYINSPVRDLNGVCFDSRFQNPEWPMDADANGAYHIALKGQLLLNHLKESKDLKLQNGISNQDWLAYIQELRN

SEQ ID NO: 216 - protein, 1307 aa, Artificial Sequence
  SYNTHETIC
MTQFEGFTNLYQVSKTLRFELIPQGKTLKHIQEQGFIEEDKARNDHYKELKPIIDRIYKTYADQCLQLVQLDWENLSAAIDSYRKEKTEETRNALIEEQATYRNAIHDYFIGRTDNLTDAINKRHAEIYKGLFKAELFNGKVLKQLGTVTTTEHENALLRSFDKFTTYFSGFYENRKNVFSAEDISTAIPHRIVQDNFPKFKENCHIFTRLITAVPSLREHFENVKKAIGIFVSTSIEEVFSFPFYNQLLTQTQIDLYNQLLGGISREAGTEKIKGLNEVLNLAIQKNDETAHIIASLPHRFIPLFKQILSDRNTLSFILEEFKSDEEVIQSFCKYKTLLRNENVLETAEALFNELNSIDLTHIFISHKKLETISSALCDHWDTLRNALYERRISELTGKITKSAKEKVQRSLKHEDINLQEIISAAGKELSEAFKQKTSEILSHAHAALDQPLPTTLKKQEEKEILKSQLDSLLGLYHLLDWFAVDESNEVDPEFSARLTGIKLEMEPSLSFYNKARNYATKKPYSVEKFKLNFQMPTLASGWDVNKEKNNGAILFVKNGLYYLGIMPKQKGRYKALSFEPTEKTSEGFDKMYYDYFPDAAKMIPKCSTQLKAVTAHFQTHTTPILLSNNFIEPLEITKEIYDLNNPEKEPKKFQTAYAKKTGDQKGYREALCKWIDFTRDFLSKYTKTTSIDLSSLRPSSQYKDLGEYYAELNPLLYHISFQRIAEKEIMDAVETGKLYLFQIYNKDFAKGHHGKPNLHTLYWTGLFSPENLAKTSIKLNGQAELFYRPKSRMKRMAHRLGEKMLNKKLKDQKTPIPDTLYQELYDYVNHRLSHDLSDEARALLPNVITKEVSHEIIKDRRFTSDKFFFHAPITLNYQAANSPSKFNQRVNAYLKEHPETPIIGIDRGERNLIYITVIDSTGKILEQRSLNTIQQFDYQKKLDNREKERVAARQAWSVVGTIKDLKQGYLSQVIHEIVDLMIHYQAVVVLENLNFGFKSKRTGIAEKAVYQQFEKMLIDKLNCLVLKDYPAEKVGGVLNPYQLTDQFTSFAKMGTQSGFLFYVPAPYTSKIDPLTGFVDPFVWKTIKNHESRKHFLEGFDFLHYDVKTGDFILHFKMNRNLSFQRGLPGFMPAWDIVFEKNETQFDAKGTPFIAGKRIVPVIENHRFTGRYRDLYPANELIALLEEKGIVFRDGSNILPKLLENDDSHAIDTMVALIRSVLQMRNSNAATGEDYINSPVRDLNGVCFDSRFQNPEWPMDADANGAYHIALKGQLLLNHLKESKDLKLQNGISNQDWLAYIQELRN

SEQ ID NO: 217 - protein, 1307 aa, Artificial Sequence
  SYNTHETIC
MTQFEGFTNLYQVSKTLRFELIPQGKTLKHIQEQGFIEEDKARNDHYKELKPIIDRIYKTYADQCLQLVQLDWENLSAAIDSYRKEKTEETRNALIEEQATYRNAIHDYFIGRTDNLTDAINKRHAEIYKGLFKAELFNGKVLKQLGTVTTTEHENALLRSFDKFTTYFSGFYENRKNVFSAEDISTAIPHRIVQDNFPKFKENCHIFTRLITAVPSLREHFENVKKAIGIFVSTSIEEVFSFPFYNQLLTQTQIDLYNQLLGGISREAGTEKIKGLNEVLNLAIQKNDETAHIIASLPHRFIPLFKQILSDRNTLSFILEEFKSDEEVIQSFCKYKTLLRNENVLETAEALFNELNSIDLTHIFISHKKLETISSALCDHWDTLRNALYERRISELTGKITKSAKEKVQRSLKHEDINLQEIISAAGKELSEAFKQKTSEILSHAHAALDQPLPTTLKKQEEKEILKSQLDSLLGLYHLLDWFAVDESNEVDPEFSARLTGIKLEMEPSLSFYNKARNYATKKPYSVEKFKLNFQMPTLASGWDVNKEKNNGAILFVKNGLYYLGIMPKQKGRYKALSFEPTEKTSEGFDKMYYDYFPDAAKMIPKCSTQLKAVTAHFQTHTTPILLSNNFIEPLEITKEIYDLNNPEKEPKKFQTAYAKKTGDQKGYREALCKWIDFTRDFLSKYTKTTSIDLSSLRPSSQYKDLGEYYAELNPLLYHISFQRIAEKEIMDAVETGKLYLFQIYNKDFAKGHHGKPNLHTLYWTGLFSPENLAKTSIKLNGQAELFYRPKSRMKRMAHRLGEKMLNKKLKDQKTPIPDTLYQELYDYVNHRLSHDLSDEARALLPNVITKEVSHEIIKDRRFTSDKFFFHVPITLDYQAANSPSKFNQRVNAYLKEHPETPIIGIDRGERNLIYITVIDSTGKILEQRSLNTIQQFDYQKKLDNREKERVAARQAWSVVGTIKDLKQGYLSQVIHEIVDLMIHYQAVVVLENLNFGFKSKRTGIAEKAVYQQFEKMLIDKLNCLVLKDYPAEKVGGVLNPYQLTDQFTSFAKMGTQSGFLFYVPAPYTSKIDPLTGFVDPFVWKTIKNHESRKHFLEGFDFLHYDVKTGDFILHFKMNRNLSFQRGLPGFMPAWDIVFEKNETQFDAKGTPFIAGKRIVPVIENHRFTGRYRDLYPANELIALLEEKGIVFRDGSNILPKLLENDDSHAIDTMVALIRSVLQMRNSNAATGEDYINSPVRDLNGVCFDSRFQNPEWPMDADANGAYHIALKGQLLLNHLKESKDLKLQNGISNQDWLAYIQELRN

SEQ ID NO: 218 - protein, 1307 aa, Artificial Sequence
  SYNTHETIC
MTQFEGFTNLYQVSKTLRFELIPQGKTLKHIQEQGFIEEDKARNDHYKELKPIIDRIYKTYADQCLQLVQLDWENLSAAIDSYRKEKTEETRNALIEEQATYRNAIHDYFIGRTDNLTDAINKRHAEIYKGLFKAELFNGKVLKQLGTVTTTEHENALLRSFDKFTTYFSGFYENRKNVFSAEDISTAIPHRIVQDNFPKFKENCHIFTRLITAVPSLREHFENVKKAIGIFVSTSIEEVFSFPFYNQLLTQTQIDLYNQLLGGISREAGTEKIKGLNEVLNLAIQKNDETAHIIASLPHRFIPLFKQILSDRNTLSFILEEFKSDEEVIQSFCKYKTLLRNENVLETAEALFNELNSIDLTHIFISHKKLETISSALCDHWDTLRNALYERRISELTGKITKSAKEKVQRSLKHEDINLQEIISAAGKELSEAFKQKTSEILSHAHAALDQPLPTTLKKQEEKEILKSQLDSLLGLYHLLDWFAVDESNEVDPEFSARLTGIKLEMEPSLSFYNKARNYATKKPYSVEKFKLNFQMPTLASGWDVNKEKNNGAILFVKNGLYYLGIMPKQKGRYKALSFEPTEKTSEGFDKMYYDYFPDAAKMIPKCSTQLKAVTAHFQTHTTPILLSNNFIEPLEITKEIYDLNNPEKEPKKFQTAYAKKTGDQKGYREALCKWIDFTRDFLSKYTKTTSIDLSSLRPSSQYKDLGEYYAELNPLLYHISFQRIAEKEIMDAVETGKLYLFQIYNKDFAKGHHGKPNLHTLYWTGLFSPENLAKTSIKLNGQAELFYRPKSRMKRMAHRLGEKMLNKKLKDQKTPIPDTLYQELYDYVNHRLSHDLSDEARALLPNVITKEVSHEIIKDRRFTSDKFFFHVPITLNYQAANSPSKFNRRVNAYLKEHPETPIIGIDRGERNLIYITVIDSTGKILEQRSLNTIQQFDYQKKLDNREKERVAARQAWSVVGTIKDLKQGYLSQVIHEIVDLMIHYQAVVVLENLNFGFKSKRTGIAEKAVYQQFEKMLIDKLNCLVLKDYPAEKVGGVLNPYQLTDQFTSFAKMGTQSGFLFYVPAPYTSKIDPLTGFVDPFVWKTIKNHESRKHFLEGFDFLHYDVKTGDFILHFKMNRNLSFQRGLPGFMPAWDIVFEKNETQFDAKGTPFIAGKRIVPVIENHRFTGRYRDLYPANELIALLEEKGIVFRDGSNILPKLLENDDSHAIDTMVALIRSVLQMRNSNAATGEDYINSPVRDLNGVCFDSRFQNPEWPMDADANGAYHIALKGQLLLNHLKESKDLKLQNGISNQDWLAYIQELRN

SEQ ID NO: 219 - protein, 1307 aa, Artificial Sequence
  SYNTHETIC
MTQFEGFTNLYQVSKTLRFELIPQGKTLKHIQEQGFIEEDKARNDHYKELKPIIDRIYKTYADQCLQLVQLDWENLSAAIDSYRKEKTEETRNALIEEQATYRNAIHDYFIGRTDNLTDAINKRHAEIYKGLFKAELFNGKVLKQLGTVTTTEHENALLRSFDKFTTYFSGFYENRKNVFSAEDISTAIPHRIVQDNFPKFKENCHIFTRLITAVPSLREHFENVKKAIGIFVSTSIEEVFSFPFYNQLLTQTQIDLYNQLLGGISREAGTEKIKGLNEVLNLAIQKNDETAHIIASLPHRFIPLFKQILSDRNTLSFILEEFKSDEEVIQSFCKYKTLLRNENVLETAEALFNELNSIDLTHIFISHKKLETISSALCDHWDTLRNALYERRISELTGKITKSAKEKVQRSLKHEDINLQEIISAAGKELSEAFKQKTSEILSHAHAALDQPLPTTLKKQEEKEILKSQLDSLLGLYHLLDWFAVDESNEVDPEFSARLTGIKLEMEPSLSFYNKARNYATKKPYSVEKFKLNFQMPTLASGWDVNKEKNNGAILFVKNGLYYLGIMPKQKGRYKALSFEPTEKTSEGFDKMYYDYFPDAAKMIPKCSTQLKAVTAHFQTHTTPILLSNNFIEPLEITKEIYDLNNPEKEPKKFQTAYAKKTGDQKGYREALCKWIDFTRDFLSKYTKTTSIDLSSLRPSSQYKDLGEYYAELNPLLYHISFQRIAEKEIMDAVETGKLYLFQIYNKDFAKGHHGKPNLHTLYWTGLFSPENLAKTSIKLNGQAELFYRPKSRMKRMAHRLGEKMLNKKLKDQKTPIPDTLYQELYDYVNHRLSHDLSDEARALLPNVITKEVSHEIIKDRRFTSDKFFFHVPITLNYQAANSPSKFNGRVNAYLKEHPETPIIGIDRGERNLIYITVIDSTGKILEQRSLNTIQQFDYQKKLDNREKERVAARQAWSVVGTIKDLKQGYLSQVIHEIVDLMIHYQAVVVLENLNFGFKSKRTGIAEKAVYQQFEKMLIDKLNCLVLKDYPAEKVGGVLNPYQLTDQFTSFAKMGTQSGFLFYVPAPYTSKIDPLTGFVDPFVWKTIKNHESRKHFLEGFDFLHYDVKTGDFILHFKMNRNLSFQRGLPGFMPAWDIVFEKNETQFDAKGTPFIAGKRIVPVIENHRFTGRYRDLYPANELIALLEEKGIVFRDGSNILPKLLENDDSHAIDTMVALIRSVLQMRNSNAATGEDYINSPVRDLNGVCFDSRFQNPEWPMDADANGAYHIALKGQLLLNHLKESKDLKLQNGISNQDWLAYIQELRN

SEQ ID NO: 220 - protein, 1307 aa, Artificial Sequence
  SYNTHETIC
MTQFEGFTNLYQVSKTLRFELIPQGKTLKHIQEQGFIEEDKARNDHYKELKPIIDRIYKTYADQCLQLVQLDWENLSAAIDSYRKEKTEETRNALIEEQATYRNAIHDYFIGRTDNLTDAINKRHAEIYKGLFKAELFNGKVLKQLGTVTTTEHENALLRSFDKFTTYFSGFYENRKNVFSAEDISTAIPHRIVQDNFPKFKENCHIFTRLITAVPSLREHFENVKKAIGIFVSTSIEEVFSFPFYNQLLTQTQIDLYNQLLGGISREAGTEKIKGLNEVLNLAIQKNDETAHIIASLPHRFIPLFKQILSDRNTLSFILEEFKSDEEVIQSFCKYKTLLRNENVLETAEALFNELNSIDLTHIFISHKKLETISSALCDHWDTLRNALYERRISELTGKITKSAKEKVQRSLKHEDINLQEIISAAGKELSEAFKQKTSEILSHAHAALDQPLPTTLKKQEEKEILKSQLDSLLGLYHLLDWFAVDESNEVDPEFSARLTGIKLEMEPSLSFYNKARNYATKKPYSVEKFKLNFQMPTLASGWDVNKEKNNGAILFVKNGLYYLGIMPKQKGRYKALSFEPTEKTSEGFDKMYYDYFPDAAKMIPKCSTQLKAVTAHFQTHTTPILLSNNFIEPLEITKEIYDLNNPEKEPKKFQTAYAKKTGDQKGYREALCKWIDFTRDFLSKYTKTTSIDLSSLRPSSQYKDLGEYYAELNPLLYHISFQRIAEKEIMDAVETGKLYLFQIYNKDFAKGHHGKPNLHTLYWTGLFSPENLAKTSIKLNGQAELFYRPKSRMKRMAHRLGEKMLNKKLKDQKTPIPDTLYQELYDYVNHRLSHDLSDEARALLPNVITKEVSHEIIKDRRFTSDKFFFHVPITLNYQADNSPSKFNQRVNAYLKEHPETPIIGIDRGERNLIYITVIDSTGKILEQRSLNTIQQFDYQKKLDNREKERVAARQAWSVVGTIKDLKQGYLSQVIHEIVDLMIHYQAVVVLENLNFGFKSKRTGIAEKAVYQQFEKMLIDKLNCLVLKDYPAEKVGGVLNPYQLTDQFTSFAKMGTQSGFLFYVPAPYTSKIDPLTGFVDPFVWKTIKNHESRKHFLEGFDFLHYDVKTGDFILHFKMNRNLSFQRGLPGFMPAWDIVFEKNETQFDAKGTPFIAGKRIVPVIENHRFTGRYRDLYPANELIALLEEKGIVFRDGSNILPKLLENDDSHAIDTMVALIRSVLQMRNSNAATGEDYINSPVRDLNGVCFDSRFQNPEWPMDADANGAYHIALKGQLLLNHLKESKDLKLQNGISNQDWLAYIQELRN

SEQ ID NO: 221 - protein, 1307 aa, Artificial Sequence
  SYNTHETIC
MTQFEGFTNLYQVSKTLRFELIPQGKTLKHIQEQGFIEEDKARNDHYKELKPIIDRIYKTYADQCLQLVQLDWENLSAAIDSYRKEKTEETRNALIEEQATYRNAIHDYFIGRTDNLTDAINKRHAEIYKGLFKAELFNGKVLKQLGTVTTTEHENALLRSFDKFTTYFSGFYENRKNVFSAEDISTAIPHRIVQDNFPKFKENCHIFTRLITAVPSLREHFENVKKAIGIFVSTSIEEVFSFPFYNQLLTQTQIDLYNQLLGGISREAGTEKIKGLNEVLNLAIQKNDETAHIIASLPHRFIPLFKQILSDRNTLSFILEEFKSDEEVIQSFCKYKTLLRNENVLETAEALFNELNSIDLTHIFISHKKLETISSALCDHWDTLRNALYERRISELTGKITKSAKEKVQRSLKHEDINLQEIISAAGKELSEAFKQKTSEILSHAHAALDQPLPTTLKKQEEKEILKSQLDSLLGLYHLLDWFAVDESNEVDPEFSARLTGIKLEMEPSLSFYNKARNYATKKPYSVEKFKLNFQMPTLASGWDVNKEKNNGAILFVKNGLYYLGIMPKQKGRYKALSFEPTEKTSEGFDKMYYDYFPDAAKMIPKCSTQLKAVTAHFQTHTTPILLSNNFIEPLEITKEIYDLNNPEKEPKKFQTAYAKKTGDQKGYREALCKWIDFTRDFLSKYTKTTSIDLSSLRPSSQYKDLGEYYAELNPLLYHISFQRIAEKEIMDAVETGKLYLFQIYNKDFAKGHHGKPNLHTLYWTGLFSPENLAKTSIKLNGQAELFYRPKSRMKRMAHRLGEKMLNKKLKDQKTPIPDTLYQELYDYVNHRLSHDLSDEARALLPNVITKEVSHEIIKDRRFTSDKFFFHVPITLNYQASNSPSKFNQRVNAYLKEHPETPIIGIDRGERNLIYITVIDSTGKILEQRSLNTIQQFDYQKKLDNREKERVAARQAWSVVGTIKDLKQGYLSQVIHEIVDLMIHYQAVVVLENLNFGFKSKRTGIAEKAVYQQFEKMLIDKLNCLVLKDYPAEKVGGVLNPYQLTDQFTSFAKMGTQSGFLFYVPAPYTSKIDPLTGFVDPFVWKTIKNHESRKHFLEGFDFLHYDVKTGDFILHFKMNRNLSFQRGLPGFMPAWDIVFEKNETQFDAKGTPFIAGKRIVPVIENHRFTGRYRDLYPANELIALLEEKGIVFRDGSNILPKLLENDDSHAIDTMVALIRSVLQMRNSNAATGEDYINSPVRDLNGVCFDSRFQNPEWPMDADANGAYHIALKGQLLLNHLKESKDLKLQNGISNQDWLAYIQELRN

SEQ ID NO: 222 - protein, 1307 aa, Artificial Sequence
  SYNTHETIC
MTQFEGFTNLYQVSKTLRFELIPQGKTLKHIQEQGFIEEDKARNDHYKELKPIIDRIYKTYADQCLQLVQLDWENLSAAIDSYRKEKTEETRNALIEEQATYRNAIHDYFIGRTDNLTDAINKRHAEIYKGLFKAELFNGKVLKQLGTVTTTEHENALLRSFDKFTTYFSGFYENRKNVFSAEDISTAIPHRIVQDNFPKFKENCHIFTRLITAVPSLREHFENVKKAIGIFVSTSIEEVFSFPFYNQLLTQTQIDLYNQLLGGISREAGTEKIKGLNEVLNLAIQKNDETAHIIASLPHRFIPLFKQILSDRNTLSFILEEFKSDEEVIQSFCKYKTLLRNENVLETAEALFNELNSIDLTHIFISHKKLETISSALCDHWDTLRNALYERRISELTGKITKSAKEKVQRSLKHEDINLQEIISAAGKELSEAFKQKTSEILSHAHAALDQPLPTTLKKQEEKEILKSQLDSLLGLYHLLDWFAVDESNEVDPEFSARLTGIKLEMEPSLSFYNKARNYATKKPYSVEKFKLNFQMPTLASGWDVNKEKNNGAILFVKNGLYYLGIMPKQKGRYKALSFEPTEKTSEGFDKMYYDYFPDAAKMIPKCSTQLKAVTAHFQTHTTPILLSNNFIEPLEITKEIYDLNNPEKEPKKFQTAYAKKTGDQKGYREALCKWIDFTRDFLSKYTKTTSIDLSSLRPSSQYKDLGEYYAELNPLLYHISFQRIAEKEIMDAVETGKLYLFQIYNKDFAKGHHGKPNLHTLYWTGLFSPENLAKTSIKLNGQAELFYRPKSRMKRMAHRLGEKMLNKKLKDQKTPIPDTLYQELYDYVNHRLSHDLSDEARALLPNVITKEVSHEIIKDRRFTSDKFFFHVPITLNYQAAGSPSKFNQRVNAYLKEHPETPIIGIDRGERNLIYITVIDSTGKILEQRSLNTIQQFDYQKKLDNREKERVAARQAWSVVGTIKDLKQGYLSQVIHEIVDLMIHYQAVVVLENLNFGFKSKRTGIAEKAVYQQFEKMLIDKLNCLVLKDYPAEKVGGVLNPYQLTDQFTSFAKMGTQSGFLFYVPAPYTSKIDPLTGFVDPFVWKTIKNHESRKHFLEGFDFLHYDVKTGDFILHFKMNRNLSFQRGLPGFMPAWDIVFEKNETQFDAKGTPFIAGKRIVPVIENHRFTGRYRDLYPANELIALLEEKGIVFRDGSNILPKLLENDDSHAIDTMVALIRSVLQMRNSNAATGEDYINSPVRDLNGVCFDSRFQNPEWPMDADANGAYHIALKGQLLLNHLKESKDLKLQNGISNQDWLAYIQELRN

SEQ ID NO: 223 - protein, 1307 aa, Artificial Sequence
  SYNTHETIC
MTQFEGFTNLYQVSKTLRFELIPQGKTLKHIQEQGFIEEDKARNDHYKELKPIIDRIYKTYADQCLQLVQLDWENLSAAIDSYRKEKTEETRNALIEEQATYRNAIHDYFIGRTDNLTDAINKRHAEIYKGLFKAELFNGKVLKQLGTVTTTEHENALLRSFDKFTTYFSGFYENRKNVFSAEDISTAIPHRIVQDNFPKFKENCHIFTRLITAVPSLREHFENVKKAIGIFVSTSIEEVFSFPFYNQLLTQTQIDLYNQLLGGISREAGTEKIKGLNEVLNLAIQKNDETAHIIASLPHRFIPLFKQILSDRNTLSFILEEFKSDEEVIQSFCKYKTLLRNENVLETAEALFNELNSIDLTHIFISHKKLETISSALCDHWDTLRNALYERRISELTGKITKSAKEKVQRSLKHEDINLQEIISAAGKELSEAFKQKTSEILSHAHAALDQPLPTTLKKQEEKEILKSQLDSLLGLYHLLDWFAVDESNEVDPEFSARLTGIKLEMEPSLSFYNKARNYATKKPYSVEKFKLNFQMPTLASGWDVNKEKNNGAILFVKNGLYYLGIMPKQKGRYKALSFEPTEKTSEGFDKMYYDYFPDAAKMIPKCSTQLKAVTAHFQTHTTPILLSNNFIEPLEITKEIYDLNNPEKEPKKFQTAYAKKTGDQKGYREALCKWIDFTRDFLSKYTKTTSIDLSSLRPSSQYKDLGEYYAELNPLLYHISFQRIAEKEIMDAVETGKLYLFQIYNKDFAKGHHGKPNLHTLYWTGLFSPENLAKTSIKLNGQAELFYRPKSRMKRMAHRLGEKMLNKKLKDQKTPIPDTLYQELYDYVNHRLSHDLSDEARALLPNVITKEVSHEIIKDRRFTSDKFFFHVPITLNYQAAKSPSKFNQRVNAYLKEHPETPIIGIDRGERNLIYITVIDSTGKILEQRSLNTIQQFDYQKKLDNREKERVAARQAWSVVGTIKDLKQGYLSQVIHEIVDLMIHYQAVVVLENLNFGFKSKRTGIAEKAVYQQFEKMLIDKLNCLVLKDYPAEKVGGVLNPYQLTDQFTSFAKMGTQSGFLFYVPAPYTSKIDPLTGFVDPFVWKTIKNHESRKHFLEGFDFLHYDVKTGDFILHFKMNRNLSFQRGLPGFMPAWDIVFEKNETQFDAKGTPFIAGKRIVPVIENHRFTGRYRDLYPANELIALLEEKGIVFRDGSNILPKLLENDDSHAIDTMVALIRSVLQMRNSNAATGEDYINSPVRDLNGVCFDSRFQNPEWPMDADANGAYHIALKGQLLLNHLKESKDLKLQNGISNQDWLAYIQELRN

SEQ ID NO: 224 - protein, 1307 aa, Artificial Sequence
  SYNTHETIC
MTQFEGFTNLYQVSKTLRFELIPQGKTLKHIQEQGFIEEDKARNDHYKELKPIIDRIYKTYADQCLQLVQLDWENLSAAIDSYRKEKTEETRNALIEEQATYRNAIHDYFIGRTDNLTDAINKRHAEIYKGLFKAELFNGKVLKQLGTVTTTEHENALLRSFDKFTTYFSGFYENRKNVFSAEDISTAIPHRIVQDNFPKFKENCHIFTRLITAVPSLREHFENVKKAIGIFVSTSIEEVFSFPFYNQLLTQTQIDLYNQLLGGISREAGTEKIKGLNEVLNLAIQKNDETAHIIASLPHRFIPLFKQILSDRNTLSFILEEFKSDEEVIQSFCKYKTLLRNENVLETAEALFNELNSIDLTHIFISHKKLETISSALCDHWDTLRNALYERRISELTGKITKSAKEKVQRSLKHEDINLQEIISAAGKELSEAFKQKTSEILSHAHAALDQPLPTTLKKQEEKEILKSQLDSLLGLYHLLDWFAVDESNEVDPEFSARLTGIKLEMEPSLSFYNKARNYATKKPYSVEKFKLNFQMPTLASGWDVNKEKNNGAILFVKNGLYYLGIMPKQKGRYKALSFEPTEKTSEGFDKMYYDYFPDAAKMIPKCSTQLKAVTAHFQTHTTPILLSNNFIEPLEITKEIYDLNNPEKEPKKFQTAYAKKTGDQKGYREALCKWIDFTRDFLSKYTKTTSIDLSSLRPSSQYKDLGEYYAELNPLLYHISFQRIAEKEIMDAVETGKLYLFQIYNKDFAKGHHGKPNLHTLYWTGLFSPENLAKTSIKLNGQAELFYRPKSRMKRMAHRLGEKMLNKKLKDQKTPIPDTLYQELYDYVNHRLSHDLSDEARALLPNVITKEVSHEIIKDRRFTSDKFFFHVPITLNYQAANVPSKFNQRVNAYLKEHPETPIIGIDRGERNLIYITVIDSTGKILEQRSLNTIQQFDYQKKLDNREKERVAARQAWSVVGTIKDLKQGYLSQVIHEIVDLMIHYQAVVVLENLNFGFKSKRTGIAEKAVYQQFEKMLIDKLNCLVLKDYPAEKVGGVLNPYQLTDQFTSFAKMGTQSGFLFYVPAPYTSKIDPLTGFVDPFVWKTIKNHESRKHFLEGFDFLHYDVKTGDFILHFKMNRNLSFQRGLPGFMPAWDIVFEKNETQFDAKGTPFIAGKRIVPVIENHRFTGRYRDLYPANELIALLEEKGIVFRDGSNILPKLLENDDSHAIDTMVALIRSVLQMRNSNAATGEDYINSPVRDLNGVCFDSRFQNPEWPMDADANGAYHIALKGQLLLNHLKESKDLKLQNGISNQDWLAYIQELRN

SEQ ID NO: 225 - protein, 1307 aa, Artificial Sequence
  SYNTHETIC
MTQFEGFTNLYQVSKTLRFELIPQGKTLKHIQEQGFIEEDKARNDHYKELKPIIDRIYKTYADQCLQLVQLDWENLSAAIDSYRKEKTEETRNALIEEQATYRNAIHDYFIGRTDNLTDAINKRHAEIYKGLFKAELFNGKVLKQLGTVTTTEHENALLRSFDKFTTYFSGFYENRKNVFSAEDISTAIPHRIVQDNFPKFKENCHIFTRLITAVPSLREHFENVKKAIGIFVSTSIEEVFSFPFYNQLLTQTQIDLYNQLLGGISREAGTEKIKGLNEVLNLAIQKNDETAHIIASLPHRFIPLFKQILSDRNTLSFILEEFKSDEEVIQSFCKYKTLLRNENVLETAEALFNELNSIDLTHIFISHKKLETISSALCDHWDTLRNALYERRISELTGKITKSAKEKVQRSLKHEDINLQEIISAAGKELSEAFKQKTSEILSHAHAALDQPLPTTLKKQEEKEILKSQLDSLLGLYHLLDWFAVDESNEVDPEFSARLTGIKLEMEPSLSFYNKARNYATKKPYSVEKFKLNFQMPTLASGWDVNKEKNNGAILFVKNGLYYLGIMPKQKGRYKALSFEPTEKTSEGFDKMYYDYFPDAAKMIPKCSTQLKAVTAHFQTHTTPILLSNNFIEPLEITKEIYDLNNPEKEPKKFQTAYAKKTGDQKGYREALCKWIDFTRDFLSKYTKTTSIDLSSLRPSSQYKDLGEYYAELNPLLYHISFQRIAEKEIMDAVETGKLYLFQIYNKDFAKGHHGKPNLHTLYWTGLFSPENLAKTSIKLNGQAELFYRPKSRMKRMAHRLGEKMLNKKLKDQKTPIPDTLYQELYDYVNHRLSHDLSDEARALLPNVITKEVSHEIIKDRRFTSDKFFFHVPITLNYQAANSPLKFNQRVNAYLKEHPETPIIGIDRGERNLIYITVIDSTGKILEQRSLNTIQQFDYQKKLDNREKERVAARQAWSVVGTIKDLKQGYLSQVIHEIVDLMIHYQAVVVLENLNFGFKSKRTGIAEKAVYQQFEKMLIDKLNCLVLKDYPAEKVGGVLNPYQLTDQFTSFAKMGTQSGFLFYVPAPYTSKIDPLTGFVDPFVWKTIKNHESRKHFLEGFDFLHYDVKTGDFILHFKMNRNLSFQRGLPGFMPAWDIVFEKNETQFDAKGTPFIAGKRIVPVIENHRFTGRYRDLYPANELIALLEEKGIVFRDGSNILPKLLENDDSHAIDTMVALIRSVLQMRNSNAATGEDYINSPVRDLNGVCFDSRFQNPEWPMDADANGAYHIALKGQLLLNHLKESKDLKLQNGISNQDWLAYIQELRN

SEQ ID NO: 226 - protein, 1307 aa, Artificial Sequence
  SYNTHETIC
MTQFEGFTNLYQVSKTLRFELIPQGKTLKHIQEQGFIEEDKARNDHYKELKPIIDRIYKTYADQCLQLVQLDWENLSAAIDSYRKEKTEETRNALIEEQATYRNAIHDYFIGRTDNLTDAINKRHAEIYKGLFKAELFNGKVLKQLGTVTTTEHENALLRSFDKFTTYFSGFYENRKNVFSAEDISTAIPHRIVQDNFPKFKENCHIFTRLITAVPSLREHFENVKKAIGIFVSTSIEEVFSFPFYNQLLTQTQIDLYNQLLGGISREAGTEKIKGLNEVLNLAIQKNDETAHIIASLPHRFIPLFKQILSDRNTLSFILEEFKSDEEVIQSFCKYKTLLRNENVLETAEALFNELNSIDLTHIFISHKKLETISSALCDHWDTLRNALYERRISELTGKITKSAKEKVQRSLKHEDINLQEIISAAGKELSEAFKQKTSEILSHAHAALDQPLPTTLKKQEEKEILKSQLDSLLGLYHLLDWFAVDESNEVDPEFSARLTGIKLEMEPSLSFYNKARNYATKKPYSVEKFKLNFQMPTLASGWDVNKEKNNGAILFVKNGLYYLGIMPKQKGRYKALSFEPTEKTSEGFDKMYYDYFPDAAKMIPKCSTQLKAVTAHFQTHTTPILLSNNFIEPLEITKEIYDLNNPEKEPKKFQTAYAKKTGDQKGYREALCKWIDFTRDFLSKYTKTTSIDLSSLRPSSQYKDLGEYYAELNPLLYHISFQRIAEKEIMDAVETGKLYLFQIYNKDFAKGHHGKPNLHTLYWTGLFSPENLAKTSIKLNGQAELFYRPKSRMKRMAHRLGEKMLNKKLKDQKTPIPDTLYQELYDYVNHRLSHDLSDEARALLPNVITKEVSHEIIKDRRFTSDKFFFHVPITLNYQAANSPMKFNQRVNAYLKEHPETPIIGIDRGERNLIYITVIDSTGKILEQRSLNTIQQFDYQKKLDNREKERVAARQAWSVVGTIKDLKQGYLSQVIHEIVDLMIHYQAVVVLENLNFGFKSKRTGIAEKAVYQQFEKMLIDKLNCLVLKDYPAEKVGGVLNPYQLTDQFTSFAKMGTQSGFLFYVPAPYTSKIDPLTGFVDPFVWKTIKNHESRKHFLEGFDFLHYDVKTGDFILHFKMNRNLSFQRGLPGFMPAWDIVFEKNETQFDAKGTPFIAGKRIVPVIENHRFTGRYRDLYPANELIALLEEKGIVFRDGSNILPKLLENDDSHAIDTMVALIRSVLQMRNSNAATGEDYINSPVRDLNGVCFDSRFQNPEWPMDADANGAYHIALKGQLLLNHLKESKDLKLQNGISNQDWLAYIQELRN

SEQ ID NO: 227 - protein, 1307 aa, Artificial Sequence
  SYNTHETIC
MTQFEGFTNLYQVSKTLRFELIPQGKTLKHIQEQGFIEEDKARNDHYKELKPIIDRIYKTYADQCLQLVQLDWENLSAAIDSYRKEKTEETRNALIEEQATYRNAIHDYFIGRTDNLTDAINKRHAEIYKGLFKAELFNGKVLKQLGTVTTTEHENALLRSFDKFTTYFSGFYENRKNVFSAEDISTAIPHRIVQDNFPKFKENCHIFTRLITAVPSLREHFENVKKAIGIFVSTSIEEVFSFPFYNQLLTQTQIDLYNQLLGGISREAGTEKIKGLNEVLNLAIQKNDETAHIIASLPHRFIPLFKQILSDRNTLSFILEEFKSDEEVIQSFCKYKTLLRNENVLETAEALFNELNSIDLTHIFISHKKLETISSALCDHWDTLRNALYERRISELTGKITKSAKEKVQRSLKHEDINLQEIISAAGKELSEAFKQKTSEILSHAHAALDQPLPTTLKKQEEKEILKSQLDSLLGLYHLLDWFAVDESNEVDPEFSARLTGIKLEMEPSLSFYNKARNYATKKPYSVEKFKLNFQMPTLASGWDVNKEKNNGAILFVKNGLYYLGIMPKQKGRYKALSFEPTEKTSEGFDKMYYDYFPDAAKMIPKCSTQLKAVTAHFQTHTTPILLSNNFIEPLEITKEIYDLNNPEKEPKKFQTAYAKKTGDQKGYREALCKWIDFTRDFLSKYTKTTSIDLSSLRPSSQYKDLGEYYAELNPLLYHISFQRIAEKEIMDAVETGKLYLFQIYNKDFAKGHHGKPNLHTLYWTGLFSPENLAKTSIKLNGQAELFYRPKSRMKRMAHRLGEKMLNKKLKDQKTPIPDTLYQELYDYVNHRLSHDLSDEARALLPNVITKEVSHEIIKDRRFTSDKFFFHVPITLNYQAANSPWKFNQRVNAYLKEHPETPIIGIDRGERNLIYITVIDSTGKILEQRSLNTIQQFDYQKKLDNREKERVAARQAWSVVGTIKDLKQGYLSQVIHEIVDLMIHYQAVVVLENLNFGFKSKRTGIAEKAVYQQFEKMLIDKLNCLVLKDYPAEKVGGVLNPYQLTDQFTSFAKMGTQSGFLFYVPAPYTSKIDPLTGFVDPFVWKTIKNHESRKHFLEGFDFLHYDVKTGDFILHFKMNRNLSFQRGLPGFMPAWDIVFEKNETQFDAKGTPFIAGKRIVPVIENHRFTGRYRDLYPANELIALLEEKGIVFRDGSNILPKLLENDDSHAIDTMVALIRSVLQMRNSNAATGEDYINSPVRDLNGVCFDSRFQNPEWPMDADANGAYHIALKGQLLLNHLKESKDLKLQNGISNQDWLAYIQELRN

SEQ ID NO: 228 - protein, 1307 aa, Artificial Sequence
  SYNTHETIC
MTQFEGFTNLYQVSKTLRFELIPQGKTLKHIQEQGFIEEDKARNDHYKELKPIIDRIYKTYADQCLQLVQLDWENLSAAIDSYRKEKTEETRNALIEEQATYRNAIHDYFIGRTDNLTDAINKRHAEIYKGLFKAELFNGKVLKQLGTVTTTEHENALLRSFDKFTTYFSGFYENRKNVFSAEDISTAIPHRIVQDNFPKFKENCHIFTRLITAVPSLREHFENVKKAIGIFVSTSIEEVFSFPFYNQLLTQTQIDLYNQLLGGISREAGTEKIKGLNEVLNLAIQKNDETAHIIASLPHRFIPLFKQILSDRNTLSFILEEFKSDEEVIQSFCKYKTLLRNENVLETAEALFNELNSIDLTHIFISHKKLETISSALCDHWDTLRNALYERRISELTGKITKSAKEKVQRSLKHEDINLQEIISAAGKELSEAFKQKTSEILSHAHAALDQPLPTTLKKQEEKEILKSQLDSLLGLYHLLDWFAVDESNEVDPEFSARLTGIKLEMEPSLSFYNKARNYATKKPYSVEKFKLNFQMPTLASGWDVNKEKNNGAILFVKNGLYYLGIMPKQKGRYKALSFEPTEKTSEGFDKMYYDYFPDAAKMIPKCSTQLKAVTAHFQTHTTPILLSNNFIEPLEITKEIYDLNNPEKEPKKFQTAYAKKTGDQKGYREALCKWIDFTRDFLSKYTKTTSIDLSSLRPSSQYKDLGEYYAELNPLLYHISFQRIAEKEIMDAVETGKLYLFQIYNKDFAKGHHGKPNLHTLYWTGLFSPENLAKTSIKLNGQAELFYRPKSRMKRMAHRLGEKMLNKKLKDQKTPIPDTLYQELYDYVNHRLSHDLSDEARALLPNVITKEVSHEIIKDRRFTSDKFFFHVPITLNYQAANSPSKFNCRVNAYLKEHPETPIIGIDRGERNLIYITVIDSTGKILEQRSLNTIQQFDYQKKLDNREKERVAARQAWSVVGTIKDLKQGYLSQVIHEIVDLMIHYQAVVVLENLNFGFKSKRTGIAEKAVYQQFEKMLIDKLNCLVLKDYPAEKVGGVLNPYQLTDQFTSFAKMGTQSGFLFYVPAPYTSKIDPLTGFVDPFVWKTIKNHESRKHFLEGFDFLHYDVKTGDFILHFKMNRNLSFQRGLPGFMPAWDIVFEKNETQFDAKGTPFIAGKRIVPVIENHRFTGRYRDLYPANELIALLEEKGIVFRDGSNILPKLLENDDSHAIDTMVALIRSVLQMRNSNAATGEDYINSPVRDLNGVCFDSRFQNPEWPMDADANGAYHIALKGQLLLNHLKESKDLKLQNGISNQDWLAYIQELRN

SEQ ID NO: 229 - protein, 1307 aa, Artificial Sequence
  SYNTHETIC
MTQFEGFTNLYQVSKTLRFELIPQGKTLKHIQEQGFIEEDKARNDHYKELKPIIDRIYKTYADQCLQLVQLDWENLSAAIDSYRKEKTEETRNALIEEQATYRNAIHDYFIGRTDNLTDAINKRHAEIYKGLFKAELFNGKVLKQLGTVTTTEHENALLRSFDKFTTYFSGFYENRKNVFSAEDISTAIPHRIVQDNFPKFKENCHIFTRLITAVPSLREHFENVKKAIGIFVSTSIEEVFSFPFYNQLLTQTQIDLYNQLLGGISREAGTEKIKGLNEVLNLAIQKNDETAHIIASLPHRFIPLFKQILSDRNTLSFILEEFKSDEEVIQSFCKYKTLLRNENVLETAEALFNELNSIDLTHIFISHKKLETISSALCDHWDTLRNALYERRISELTGKITKSAKEKVQRSLKHEDINLQEIISAAGKELSEAFKQKTSEILSHAHAALDQPLPTTLKKQEEKEILKSQLDSLLGLYHLLDWFAVDESNEVDPEFSARLTGIKLEMEPSLSFYNKARNYATKKPYSVEKFKLNFQMPTLASGWDVNKEKNNGAILFVKNGLYYLGIMPKQKGRYKALSFEPTEKTSEGFDKMYYDYFPDAAKMIPKCSTQLKAVTAHFQTHTTPILLSNNFIEPLEITKEIYDLNNPEKEPKKFQTAYAKKTGDQKGYREALCKWIDFTRDFLSKYTKTTSIDLSSLRPSSQYKDLGEYYAELNPLLYHISFQRIAEKEIMDAVETGKLYLFQIYNKDFAKGHHGKPNLHTLYWTGLFSPENLAKTSIKLNGQAELFYRPKSRMKRMAHRLGEKMLNKKLKDQKTPIPDTLYQELYDYVNHRLSHDLSDEARALLPNVITKEVSHEIIKDRRFTSDKFFFHVPITLNYQAANSPSKFNHRVNAYLKEHPETPIIGIDRGERNLIYITVIDSTGKILEQRSLNTIQQFDYQKKLDNREKERVAARQAWSVVGTIKDLKQGYLSQVIHEIVDLMIHYQAVVVLENLNFGFKSKRTGIAEKAVYQQFEKMLIDKLNCLVLKDYPAEKVGGVLNPYQLTDQFTSFAKMGTQSGFLFYVPAPYTSKIDPLTGFVDPFVWKTIKNHESRKHFLEGFDFLHYDVKTGDFILHFKMNRNLSFQRGLPGFMPAWDIVFEKNETQFDAKGTPFIAGKRIVPVIENHRFTGRYRDLYPANELIALLEEKGIVFRDGSNILPKLLENDDSHAIDTMVALIRSVLQMRNSNAATGEDYINSPVRDLNGVCFDSRFQNPEWPMDADANGAYHIALKGQLLLNHLKESKDLKLQNGISNQDWLAYIQELRN

SEQ ID NO: 230 - protein, 1307 aa, Artificial Sequence
  SYNTHETIC
MTQFEGFTNLYQVSKTLRFELIPQGKTLKHIQEQGFIEEDKARNDHYKELKPIIDRIYKTYADQCLQLVQLDWENLSAAIDSYRKEKTEETRNALIEEQATYRNAIHDYFIGRTDNLTDAINKRHAEIYKGLFKAELFNGKVLKQLGTVTTTEHENALLRSFDKFTTYFSGFYENRKNVFSAEDISTAIPHRIVQDNFPKFKENCHIFTRLITAVPSLREHFENVKKAIGIFVSTSIEEVFSFPFYNQLLTQTQIDLYNQLLGGISREAGTEKIKGLNEVLNLAIQKNDETAHIIASLPHRFIPLFKQILSDRNTLSFILEEFKSDEEVIQSFCKYKTLLRNENVLETAEALFNELNSIDLTHIFISHKKLETISSALCDHWDTLRNALYERRISELTGKITKSAKEKVQRSLKHEDINLQEIISAAGKELSEAFKQKTSEILSHAHAALDQPLPTTLKKQEEKEILKSQLDSLLGLYHLLDWFAVDESNEVDPEFSARLTGIKLEMEPSLSFYNKARNYATKKPYSVEKFKLNFQMPTLASGWDVNKEKNNGAILFVKNGLYYLGIMPKQKGRYKALSFEPTEKTSEGFDKMYYDYFPDAAKMIPKCSTQLKAVTAHFQTHTTPILLSNNFIEPLEITKEIYDLNNPEKEPKKFQTAYAKKTGDQKGYREALCKWIDFTRDFLSKYTKTTSIDLSSLRPSSQYKDLGEYYAELNPLLYHISFQRIAEKEIMDAVETGKLYLFQIYNKDFAKGHHGKPNLHTLYWTGLFSPENLAKTSIKLNGQAELFYRPKSRMKRMAHRLGEKMLNKKLKDQKTPIPDTLYQELYDYVNHRLSHDLSDEARALLPNVITKEVSHEIIKDRRFTSDKFFFHVPITLNYQAANSPSKFNWRVNAYLKEHPETPIIGIDRGERNLIYITVIDSTGKILEQRSLNTIQQFDYQKKLDNREKERVAARQAWSVVGTIKDLKQGYLSQVIHEIVDLMIHYQAVVVLENLNFGFKSKRTGIAEKAVYQQFEKMLIDKLNCLVLKDYPAEKVGGVLNPYQLTDQFTSFAKMGTQSGFLFYVPAPYTSKIDPLTGFVDPFVWKTIKNHESRKHFLEGFDFLHYDVKTGDFILHFKMNRNLSFQRGLPGFMPAWDIVFEKNETQFDAKGTPFIAGKRIVPVIENHRFTGRYRDLYPANELIALLEEKGIVFRDGSNILPKLLENDDSHAIDTMVALIRSVLQMRNSNAATGEDYINSPVRDLNGVCFDSRFQNPEWPMDADANGAYHIALKGQLLLNHLKESKDLKLQNGISNQDWLAYIQELRN

SEQ ID NO: 231 - protein, 1307 aa, Artificial Sequence
  SYNTHETIC
MTQFEGFTNLYQVSKTLRFELIPQGKTLKHIQEQGFIEEDKARNDHYKELKPIIDRIYKTYADQCLQLVQLDWENLSAAIDSYRKEKTEETRNALIEEQATYRNAIHDYFIGRTDNLTDAINKRHAEIYKGLFKAELFNGKVLKQLGTVTTTEHENALLRSFDKFTTYFSGFYENRKNVFSAEDISTAIPHRIVQDNFPKFKENCHIFTRLITAVPSLREHFENVKKAIGIFVSTSIEEVFSFPFYNQLLTQTQIDLYNQLLGGISREAGTEKIKGLNEVLNLAIQKNDETAHIIASLPHRFIPLFKQILSDRNTLSFILEEFKSDEEVIQSFCKYKTLLRNENVLETAEALFNELNSIDLTHIFISHKKLETISSALCDHWDTLRNALYERRISELTGKITKSAKEKVQRSLKHEDINLQEIISAAGKELSEAFKQKTSEILSHAHAALDQPLPTTLKKQEEKEILKSQLDSLLGLYHLLDWFAVDESNEVDPEFSARLTGIKLEMEPSLSFYNKARNYATKKPYSVEKFKLNFQMPTLASGWDVNKEKNNGAILFVKNGLYYLGIMPKQKGRYKALSFEPTEKTSEGFDKMYYDYFPDAAKMIPKCSTQLKAVTAHFQTHTTPILLSNNFIEPLEITKEIYDLNNPEKEPKKFQTAYAKKTGDQKGYREALCKWIDFTRDFLSKYTKTTSIDLSSLRPSSQYKDLGEYYAELNPLLYHISFQRIAEKEIMDAVETGKLYLFQIYNKDFAKGHHGKPNLHTLYWTGLFSPENLAKTSIKLNGQAELFYRPKSRMKRMAHRLGEKMLNKKLKDQKTPIPDTLYQELYDYVNHRLSHDLSDEARALLPNVITKEVSHEIIKDRRFTSDKFFFHVPITLNYQAANSPSKFNQRVNRYLKEHPETPIIGIDRGERNLIYITVIDSTGKILEQRSLNTIQQFDYQKKLDNREKERVAARQAWSVVGTIKDLKQGYLSQVIHEIVDLMIHYQAVVVLENLNFGFKSKRTGIAEKAVYQQFEKMLIDKLNCLVLKDYPAEKVGGVLNPYQLTDQFTSFAKMGTQSGFLFYVPAPYTSKIDPLTGFVDPFVWKTIKNHESRKHFLEGFDFLHYDVKTGDFILHFKMNRNLSFQRGLPGFMPAWDIVFEKNETQFDAKGTPFIAGKRIVPVIENHRFTGRYRDLYPANELIALLEEKGIVFRDGSNILPKLLENDDSHAIDTMVALIRSVLQMRNSNAATGEDYINSPVRDLNGVCFDSRFQNPEWPMDADANGAYHIALKGQLLLNHLKESKDLKLQNGISNQDWLAYIQELRN

SEQ ID NO: 232 - protein, 1307 aa, Artificial Sequence
  SYNTHETIC
MTQFEGFTNLYQVSKTLRFELIPQGKTLKHIQEQGFIEEDKARNDHYKELKPIIDRIYKTYADQCLQLVQLDWENLSAAIDSYRKEKTEETRNALIEEQATYRNAIHDYFIGRTDNLTDAINKRHAEIYKGLFKAELFNGKVLKQLGTVTTTEHENALLRSFDKFTTYFSGFYENRKNVFSAEDISTAIPHRIVQDNFPKFKENCHIFTRLITAVPSLREHFENVKKAIGIFVSTSIEEVFSFPFYNQLLTQTQIDLYNQLLGGISREAGTEKIKGLNEVLNLAIQKNDETAHIIASLPHRFIPLFKQILSDRNTLSFILEEFKSDEEVIQSFCKYKTLLRNENVLETAEALFNELNSIDLTHIFISHKKLETISSALCDHWDTLRNALYERRISELTGKITKSAKEKVQRSLKHEDINLQEIISAAGKELSEAFKQKTSEILSHAHAALDQPLPTTLKKQEEKEILKSQLDSLLGLYHLLDWFAVDESNEVDPEFSARLTGIKLEMEPSLSFYNKARNYATKKPYSVEKFKLNFQMPTLASGWDVNKEKNNGAILFVKNGLYYLGIMPKQKGRYKALSFEPTEKTSEGFDKMYYDYFPDAAKMIPKCSTQLKAVTAHFQTHTTPILLSNNFIEPLEITKEIYDLNNPEKEPKKFQTAYAKKTGDQKGYREALCKWIDFTRDFLSKYTKTTSIDLSSLRPSSQYKDLGEYYAELNPLLYHISFQRIAEKEIMDAVETGKLYLFQIYNKDFAKGHHGKPNLHTLYWTGLFSPENLAKTSIKLNGQAELFYRPKSRMKRMAHRLGEKMLNKKLKDQKTPIPDTLYQELYDYVNHRLSHDLSDEARALLPNVITKEVSHEIIKDRRFTSDKFFFHVPITLNYQAANSPSKFNQRVNDYLKEHPETPIIGIDRGERNLIYITVIDSTGKILEQRSLNTIQQFDYQKKLDNREKERVAARQAWSVVGTIKDLKQGYLSQVIHEIVDLMIHYQAVVVLENLNFGFKSKRTGIAEKAVYQQFEKMLIDKLNCLVLKDYPAEKVGGVLNPYQLTDQFTSFAKMGTQSGFLFYVPAPYTSKIDPLTGFVDPFVWKTIKNHESRKHFLEGFDFLHYDVKTGDFILHFKMNRNLSFQRGLPGFMPAWDIVFEKNETQFDAKGTPFIAGKRIVPVIENHRFTGRYRDLYPANELIALLEEKGIVFRDGSNILPKLLENDDSHAIDTMVALIRSVLQMRNSNAATGEDYINSPVRDLNGVCFDSRFQNPEWPMDADANGAYHIALKGQLLLNHLKESKDLKLQNGISNQDWLAYIQELRN

SEQ ID NO: 233 - protein, 1307 aa, Artificial Sequence
  SYNTHETIC
MTQFEGFTNLYQVSKTLRFELIPQGKTLKHIQEQGFIEEDKARNDHYKELKPIIDRIYKTYADQCLQLVQLDWENLSAAIDSYRKEKTEETRNALIEEQATYRNAIHDYFIGRTDNLTDAINKRHAEIYKGLFKAELFNGKVLKQLGTVTTTEHENALLRSFDKFTTYFSGFYENRKNVFSAEDISTAIPHRIVQDNFPKFKENCHIFTRLITAVPSLREHFENVKKAIGIFVSTSIEEVFSFPFYNQLLTQTQIDLYNQLLGGISREAGTEKIKGLNEVLNLAIQKNDETAHIIASLPHRFIPLFKQILSDRNTLSFILEEFKSDEEVIQSFCKYKTLLRNENVLETAEALFNELNSIDLTHIFISHKKLETISSALCDHWDTLRNALYERRISELTGKITKSAKEKVQRSLKHEDINLQEIISAAGKELSEAFKQKTSEILSHAHAALDQPLPTTLKKQEEKEILKSQLDSLLGLYHLLDWFAVDESNEVDPEFSARLTGIKLEMEPSLSFYNKARNYATKKPYSVEKFKLNFQMPTLASGWDVNKEKNNGAILFVKNGLYYLGIMPKQKGRYKALSFEPTEKTSEGFDKMYYDYFPDAAKMIPKCSTQLKAVTAHFQTHTTPILLSNNFIEPLEITKEIYDLNNPEKEPKKFQTAYAKKTGDQKGYREALCKWIDFTRDFLSKYTKTTSIDLSSLRPSSQYKDLGEYYAELNPLLYHISFQRIAEKEIMDAVETGKLYLFQIYNKDFAKGHHGKPNLHTLYWTGLFSPENLAKTSIKLNGQAELFYRPKSRMKRMAHRLGEKMLNKKLKDQKTPIPDTLYQELYDYVNHRLSHDLSDEARALLPNVITKEVSHEIIKDRRFTSDKFFFHVPITLNYQAANSPSKFNQRVNADLKEHPETPIIGIDRGERNLIYITVIDSTGKILEQRSLNTIQQFDYQKKLDNREKERVAARQAWSVVGTIKDLKQGYLSQVIHEIVDLMIHYQAVVVLENLNFGFKSKRTGIAEKAVYQQFEKMLIDKLNCLVLKDYPAEKVGGVLNPYQLTDQFTSFAKMGTQSGFLFYVPAPYTSKIDPLTGFVDPFVWKTIKNHESRKHFLEGFDFLHYDVKTGDFILHFKMNRNLSFQRGLPGFMPAWDIVFEKNETQFDAKGTPFIAGKRIVPVIENHRFTGRYRDLYPANELIALLEEKGIVFRDGSNILPKLLENDDSHAIDTMVALIRSVLQMRNSNAATGEDYINSPVRDLNGVCFDSRFQNPEWPMDADANGAYHIALKGQLLLNHLKESKDLKLQNGISNQDWLAYIQELRN

SEQ ID NO: 234 - protein, 1307 aa, Artificial Sequence
  SYNTHETIC
MTQFEGFTNLYQVSKTLRFELIPQGKTLKHIQEQGFIEEDKARNDHYKELKPIIDRIYKTYADQCLQLVQLDWENLSAAIDSYRKEKTEETRNALIEEQATYRNAIHDYFIGRTDNLTDAINKRHAEIYKGLFKAELFNGKVLKQLGTVTTTEHENALLRSFDKFTTYFSGFYENRKNVFSAEDISTAIPHRIVQDNFPKFKENCHIFTRLITAVPSLREHFENVKKAIGIFVSTSIEEVFSFPFYNQLLTQTQIDLYNQLLGGISREAGTEKIKGLNEVLNLAIQKNDETAHIIASLPHRFIPLFKQILSDRNTLSFILEEFKSDEEVIQSFCKYKTLLRNENVLETAEALFNELNSIDLTHIFISHKKLETISSALCDHWDTLRNALYERRISELTGKITKSAKEKVQRSLKHEDINLQEIISAAGKELSEAFKQKTSEILSHAHAALDQPLPTTLKKQEEKEILKSQLDSLLGLYHLLDWFAVDESNEVDPEFSARLTGIKLEMEPSLSFYNKARNYATKKPYSVEKFKLNFQMPTLASGWDVNKEKNNGAILFVKNGLYYLGIMPKQKGRYKALSFEPTEKTSEGFDKMYYDYFPDAAKMIPKCSTQLKAVTAHFQTHTTPILLSNNFIEPLEITKEIYDLNNPEKEPKKFQTAYAKKTGDQKGYREALCKWIDFTRDFLSKYTKTTSIDLSSLRPSSQYKDLGEYYAELNPLLYHISFQRIAEKEIMDAVETGKLYLFQIYNKDFAKGHHGKPNLHTLYWTGLFSPENLAKTSIKLNGQAELFYRPKSRMKRMAHRLGEKMLNKKLKDQKTPIPDTLYQELYDYVNHRLSHDLSDEARALLPNVITKEVSHEIIKDRRFTSDKFFFHVPITLNYQAANSPSKFNQRVNAYLKEAPETPIIGIDRGERNLIYITVIDSTGKILEQRSLNTIQQFDYQKKLDNREKERVAARQAWSVVGTIKDLKQGYLSQVIHEIVDLMIHYQAVVVLENLNFGFKSKRTGIAEKAVYQQFEKMLIDKLNCLVLKDYPAEKVGGVLNPYQLTDQFTSFAKMGTQSGFLFYVPAPYTSKIDPLTGFVDPFVWKTIKNHESRKHFLEGFDFLHYDVKTGDFILHFKMNRNLSFQRGLPGFMPAWDIVFEKNETQFDAKGTPFIAGKRIVPVIENHRFTGRYRDLYPANELIALLEEKGIVFRDGSNILPKLLENDDSHAIDTMVALIRSVLQMRNSNAATGEDYINSPVRDLNGVCFDSRFQNPEWPMDADANGAYHIALKGQLLLNHLKESKDLKLQNGISNQDWLAYIQELRN

SEQ ID NO: 235 - protein, 1307 aa, Artificial Sequence
  SYNTHETIC
MTQFEGFTNLYQVSKTLRFELIPQGKTLKHIQEQGFIEEDKARNDHYKELKPIIDRIYKTYADQCLQLVQLDWENLSAAIDSYRKEKTEETRNALIEEQATYRNAIHDYFIGRTDNLTDAINKRHAEIYKGLFKAELFNGKVLKQLGTVTTTEHENALLRSFDKFTTYFSGFYENRKNVFSAEDISTAIPHRIVQDNFPKFKENCHIFTRLITAVPSLREHFENVKKAIGIFVSTSIEEVFSFPFYNQLLTQTQIDLYNQLLGGISREAGTEKIKGLNEVLNLAIQKNDETAHIIASLPHRFIPLFKQILSDRNTLSFILEEFKSDEEVIQSFCKYKTLLRNENVLETAEALFNELNSIDLTHIFISHKKLETISSALCDHWDTLRNALYERRISELTGKITKSAKEKVQRSLKHEDINLQEIISAAGKELSEAFKQKTSEILSHAHAALDQPLPTTLKKQEEKEILKSQLDSLLGLYHLLDWFAVDESNEVDPEFSARLTGIKLEMEPSLSFYNKARNYATKKPYSVEKFKLNFQMPTLASGWDVNKEKNNGAILFVKNGLYYLGIMPKQKGRYKALSFEPTEKTSEGFDKMYYDYFPDAAKMIPKCSTQLKAVTAHFQTHTTPILLSNNFIEPLEITKEIYDLNNPEKEPKKFQTAYAKKTGDQKGYREALCKWIDFTRDFLSKYTKTTSIDLSSLRPSSQYKDLGEYYAELNPLLYHISFQRIAEKEIMDAVETGKLYLFQIYNKDFAKGHHGKPNLHTLYWTGLFSPENLAKTSIKLNGQAELFYRPKSRMKRMAHRLGEKMLNKKLKDQKTPIPDTLYQELYDYVNHRLSHDLSDEARALLPNVITKEVSHEIIKDRRFTSDKFFFHVPITLNYQAANSPSKFNQRVNAYLKENPETPIIGIDRGERNLIYITVIDSTGKILEQRSLNTIQQFDYQKKLDNREKERVAARQAWSVVGTIKDLKQGYLSQVIHEIVDLMIHYQAVVVLENLNFGFKSKRTGIAEKAVYQQFEKMLIDKLNCLVLKDYPAEKVGGVLNPYQLTDQFTSFAKMGTQSGFLFYVPAPYTSKIDPLTGFVDPFVWKTIKNHESRKHFLEGFDFLHYDVKTGDFILHFKMNRNLSFQRGLPGFMPAWDIVFEKNETQFDAKGTPFIAGKRIVPVIENHRFTGRYRDLYPANELIALLEEKGIVFRDGSNILPKLLENDDSHAIDTMVALIRSVLQMRNSNAATGEDYINSPVRDLNGVCFDSRFQNPEWPMDADANGAYHIALKGQLLLNHLKESKDLKLQNGISNQDWLAYIQELRN

SEQ ID NO: 236 - protein, 1307 aa, Artificial Sequence
  SYNTHETIC
MTQFEGFTNLYQVSKTLRFELIPQGKTLKHIQEQGFIEEDKARNDHYKELKPIIDRIYKTYADQCLQLVQLDWENLSAAIDSYRKEKTEETRNALIEEQATYRNAIHDYFIGRTDNLTDAINKRHAEIYKGLFKAELFNGKVLKQLGTVTTTEHENALLRSFDKFTTYFSGFYENRKNVFSAEDISTAIPHRIVQDNFPKFKENCHIFTRLITAVPSLREHFENVKKAIGIFVSTSIEEVFSFPFYNQLLTQTQIDLYNQLLGGISREAGTEKIKGLNEVLNLAIQKNDETAHIIASLPHRFIPLFKQILSDRNTLSFILEEFKSDEEVIQSFCKYKTLLRNENVLETAEALFNELNSIDLTHIFISHKKLETISSALCDHWDTLRNALYERRISELTGKITKSAKEKVQRSLKHEDINLQEIISAAGKELSEAFKQKTSEILSHAHAALDQPLPTTLKKQEEKEILKSQLDSLLGLYHLLDWFAVDESNEVDPEFSARLTGIKLEMEPSLSFYNKARNYATKKPYSVEKFKLNFQMPTLASGWDVNKEKNNGAILFVKNGLYYLGIMPKQKGRYKALSFEPTEKTSEGFDKMYYDYFPDAAKMIPKCSTQLKAVTAHFQTHTTPILLSNNFIEPLEITKEIYDLNNPEKEPKKFQTAYAKKTGDQKGYREALCKWIDFTRDFLSKYTKTTSIDLSSLRPSSQYKDLGEYYAELNPLLYHISFQRIAEKEIMDAVETGKLYLFQIYNKDFAKGHHGKPNLHTLYWTGLFSPENLAKTSIKLNGQAELFYRPKSRMKRMAHRLGEKMLNKKLKDQKTPIPDTLYQELYDYVNHRLSHDLSDDARALLPNVITKEVSHEIIKDRRFTSDKFFFHVPITLNYQAANSPSKFNQRVNAYLKEHPETPIIGIDRGERNLIYITVIDSTGKILEQRSLNTIQQFDYQKKLDNREKERVAARQAWSVVGTIKDLKQGYLSQVIHEIVDLMIHYQAVVVLENLNFGFKSKRTGIAEKAVYQQFEKMLIDKLNCLVLKDYPAEKVGGVLNPYQLTDQFTSFAKMGTQSGFLFYVPAPYTSKIDPLTGFVDPFVWKTIKNHESRKHFLEGFDFLHYDVKTGDFILHFKMNRNLSFQRGLPGFMPAWDIVFEKNETQFDAKGTPFIAGKRIVPVIENHRFTGRYRDLYPANELIALLEEKGIVFRDGSNILPKLLENDDSHAIDTMVALIRSVLQMRNSNAATGEDYINSPVRDLNGVCFDSRFQNPEWPMDADANGAYHIALKGQLLLNHLKESKDLKLQNGISNQDWLAYIQELRN

SEQ ID NO: 237 - protein, 1307 aa, Artificial Sequence
  SYNTHETIC
MTQFEGFTNLYQVSKTLRFELIPQGKTLKHIQEQGFIEEDKARNDHYKELKPIIDRIYKTYADQCLQLVQLDWENLSAAIDSYRKEKTEETRNALIEEQATYRNAIHDYFIGRTDNLTDAINKRHAEIYKGLFKAELFNGKVLKQLGTVTTTEHENALLRSFDKFTTYFSGFYENRKNVFSAEDISTAIPHRIVQDNFPKFKENCHIFTRLITAVPSLREHFENVKKAIGIFVSTSIEEVFSFPFYNQLLTQTQIDLYNQLLGGISREAGTEKIKGLNEVLNLAIQKNDETAHIIASLPHRFIPLFKQILSDRNTLSFILEEFKSDEEVIQSFCKYKTLLRNENVLETAEALFNELNSIDLTHIFISHKKLETISSALCDHWDTLRNALYERRISELTGKITKSAKEKVQRSLKHEDINLQEIISAAGKELSEAFKQKTSEILSHAHAALDQPLPTTLKKQEEKEILKSQLDSLLGLYHLLDWFAVDESNEVDPEFSARLTGIKLEMEPSLSFYNKARNYATKKPYSVEKFKLNFQMPTLASGWDVNKEKNNGAILFVKNGLYYLGIMPKQKGRYKALSFEPTEKTSEGFDKMYYDYFPDAAKMIPKCSTQLKAVTAHFQTHTTPILLSNNFIEPLEITKEIYDLNNPEKEPKKFQTAYAKKTGDQKGYREALCKWIDFTRDFLSKYTKTTSIDLSSLRPSSQYKDLGEYYAELNPLLYHISFQRIAEKEIMDAVETGKLYLFQIYNKDFAKGHHGKPNLHTLYWTGLFSPENLAKTSIKLNGQAELFYRPKSRMKRMAHRLGEKMLNKKLKDQKTPIPDTLYQELYDYVNHRLSHDLSDEARALLPNVITKEVSHEIIKDRRFTSDKFFFHVPITLNYQAANSPSKFNQRVNAYLKEHPETTIIGIDRGERNLIYITVIDSTGKILEQRSLNTIQQFDYQKKLDNREKERVAARQAWSVVGTIKDLKQGYLSQVIHEIVDLMIHYQAVVVLENLNFGFKSKRTGIAEKAVYQQFEKMLIDKLNCLVLKDYPAEKVGGVLNPYQLTDQFTSFAKMGTQSGFLFYVPAPYTSKIDPLTGFVDPFVWKTIKNHESRKHFLEGFDFLHYDVKTGDFILHFKMNRNLSFQRGLPGFMPAWDIVFEKNETQFDAKGTPFIAGKRIVPVIENHRFTGRYRDLYPANELIALLEEKGIVFRDGSNILPKLLENDDSHAIDTMVALIRSVLQMRNSNAATGEDYINSPVRDLNGVCFDSRFQNPEWPMDADANGAYHIALKGQLLLNHLKESKDLKLQNGISNQDWLAYIQELRN

SEQ ID NO: 238 - protein, 1307 aa, Artificial Sequence
  SYNTHETIC
MTQFEGFTNLYQVSKTLRFELIPQGKTLKHIQEQGFIEEDKARNDHYKELKPIIDRIYKTYADQCLQLVQLDWENLSAAIDSYRKEKTEETRNALIEEQATYRNAIHDYFIGRTDNLTDAINKRHAEIYKGLFKAELFNGKVLKQLGTVTTTEHENALLRSFDKFTTYFSGFYENRKNVFSAEDISTAIPHRIVQDNFPKFKENCHIFTRLITAVPSLREHFENVKKAIGIFVSTSIEEVFSFPFYNQLLTQTQIDLYNQLLGGISREAGTEKIKGLNEVLNLAIQKNDETAHIIASLPHRFIPLFKQILSDRNTLSFILEEFKSDEEVIQSFCKYKTLLRNENVLETAEALFNELNSIDLTHIFISHKKLETISSALCDHWDTLRNALYERRISELTGKITKSAKEKVQRSLKHEDINLQEIISAAGKELSEAFKQKTSEILSHAHAALDQPLPTTLKKQEEKEILKSQLDSLLGLYHLLDWFAVDESNEVDPEFSARLTGIKLEMEPSLSFYNKARNYATKKPYSVEKFKLNFQMPTLASGWDVNKEKNNGAILFVKNGLYYLGIMPKQKGRYKALSFEPTEKTSEGFDKMYYDYFPDAAKMIPKCSTQLKAVTAHFQTHTTPILLSNNFIEPLEITKEIYDLNNPEKEPKKFQTAYAKKTGDQKGYREALCKWIDFTRDFLSKYTKTTSIDLSSLRPSSQYKDLGEYYAELNPLLYHISFQRIAEKEIMDAVETGKLYLFQIYNKDFAKGHHGKPNLHTLYWTGLFSPENLAKTSIKLNGQAELFYRPKSRMKRMAHRLGEKMLNKKLKDQKTPIPDTLYQELYDYVNHRLSHDLSDEARALLPNVITKEVSHEIIKDRRFTSDKFFFHVPITLNYQAANSPSKFNQRVNAYLKEHPETPIIAIDRGERNLIYITVIDSTGKILEQRSLNTIQQFDYQKKLDNREKERVAARQAWSVVGTIKDLKQGYLSQVIHEIVDLMIHYQAVVVLENLNFGFKSKRTGIAEKAVYQQFEKMLIDKLNCLVLKDYPAEKVGGVLNPYQLTDQFTSFAKMGTQSGFLFYVPAPYTSKIDPLTGFVDPFVWKTIKNHESRKHFLEGFDFLHYDVKTGDFILHFKMNRNLSFQRGLPGFMPAWDIVFEKNETQFDAKGTPFIAGKRIVPVIENHRFTGRYRDLYPANELIALLEEKGIVFRDGSNILPKLLENDDSHAIDTMVALIRSVLQMRNSNAATGEDYINSPVRDLNGVCFDSRFQNPEWPMDADANGAYHIALKGQLLLNHLKESKDLKLQNGISNQDWLAYIQELRN

SEQ ID NO: 239 - protein, 1307 aa, Artificial Sequence
  SYNTHETIC
MTQFEGFTNLYQVSKTLRFELIPQGKTLKHIQEQGFIEEDKARNDHYKELKPIIDRIYKTYADQCLQLVQLDWENLSAAIDSYRKEKTEETRNALIEEQATYRNAIHDYFIGRTDNLTDAINKRHAEIYKGLFKAELFNGKVLKQLGTVTTTEHENALLRSFDKFTTYFSGFYENRKNVFSAEDISTAIPHRIVQDNFPKFKENCHIFTRLITAVPSLREHFENVKKAIGIFVSTSIEEVFSFPFYNQLLTQTQIDLYNQLLGGISREAGTEKIKGLNEVLNLAIQKNDETAHIIASLPHRFIPLFKQILSDRNTLSFILEEFKSDEEVIQSFCKYKTLLRNENVLETAEALFNELNSIDLTHIFISHKKLETISSALCDHWDTLRNALYERRISELTGKITKSAKEKVQRSLKHEDINLQEIISAAGKELSEAFKQKTSEILSHAHAALDQPLPTTLKKQEEKEILKSQLDSLLGLYHLLDWFAVDESNEVDPEFSARLTGIKLEMEPSLSFYNKARNYATKKPYSVEKFKLNFQMPTLASGWDVNKEKNNGAILFVKNGLYYLGIMPKQKGRYKALSFEPTEKTSEGFDKMYYDYFPDAAKMIPKCSTQLKAVTAHFQTHTTPILLSNNFIEPLEITKEIYDLNNPEKEPKKFQTAYAKKTGDQKGYREALCKWIDFTRDFLSKYTKTTSIDLSSLRPSSQYKDLGEYYAELNPLLYHISFQRIAEKEIMDAVETGKLYLFQIYNKDFAKGHHGKPNLHTLYWTGLFSPENLAKTSIKLNGQAELFYRPKSRMKRMAHRLGEKMLNKKLKDQKTPIPDTLYQELYDYVNHRLSHDLSDEARALLPNVITKEVSHEIIKDRRFTSDKFFFHVPITLNYQAANSPSKFNQRVNAYLKEHPETPIISIDRGERNLIYITVIDSTGKILEQRSLNTIQQFDYQKKLDNREKERVAARQAWSVVGTIKDLKQGYLSQVIHEIVDLMIHYQAVVVLENLNFGFKSKRTGIAEKAVYQQFEKMLIDKLNCLVLKDYPAEKVGGVLNPYQLTDQFTSFAKMGTQSGFLFYVPAPYTSKIDPLTGFVDPFVWKTIKNHESRKHFLEGFDFLHYDVKTGDFILHFKMNRNLSFQRGLPGFMPAWDIVFEKNETQFDAKGTPFIAGKRIVPVIENHRFTGRYRDLYPANELIALLEEKGIVFRDGSNILPKLLENDDSHAIDTMVALIRSVLQMRNSNAATGEDYINSPVRDLNGVCFDSRFQNPEWPMDADANGAYHIALKGQLLLNHLKESKDLKLQNGISNQDWLAYIQELRN

SEQ ID NO: 240 - protein, 1307 aa, Artificial Sequence
  SYNTHETIC
MTQFEGFTNLYQVSKTLRFELIPQGKTLKHIQEQGFIEEDKARNDHYKELKPIIDRIYKTYADQCLQLVQLDWENLSAAIDSYRKEKTEETRNALIEEQATYRNAIHDYFIGRTDNLTDAINKRHAEIYKGLFKAELFNGKVLKQLGTVTTTEHENALLRSFDKFTTYFSGFYENRKNVFSAEDISTAIPHRIVQDNFPKFKENCHIFTRLITAVPSLREHFENVKKAIGIFVSTSIEEVFSFPFYNQLLTQTQIDLYNQLLGGISREAGTEKIKGLNEVLNLAIQKNDETAHIIASLPHRFIPLFKQILSDRNTLSFILEEFKSDEEVIQSFCKYKTLLRNENVLETAEALFNELNSIDLTHIFISHKKLETISSALCDHWDTLRNALYERRISELTGKITKSAKEKVQRSLKHEDINLQEIISAAGKELSEAFKQKTSEILSHAHAALDQPLPTTLKKQEEKEILKSQLDSLLGLYHLLDWFAVDESNEVDPEFSARLTGIKLEMEPSLSFYNKARNYATKKPYSVEKFKLNFQMPTLASGWDVNKEKNNGAILFVKNGLYYLGIMPKQKGRYKALSFEPTEKTSEGFDKMYYDYFPDAAKMIPKCSTQLKAVTAHFQTHTTPILLSNNFIEPLEITKEIYDLNNPEKEPKKFQTAYAKKTGDQKGYREALCKWIDFTRDFLSKYTKTTSIDLSSLRPSSQYKDLGEYYAELNPLLYHISFQRIAEKEIMDAVETGKLYLFQIYNKDFAKGHHGKPNLHTLYWTGLFSPENLAKTSIKLNGQAELFYRPKSRMKRMAHRLGEKMLNKKLKDQKTPIPDTLYQELYDYVNHRLSHDLSDEARALLPNVITKEVSHEIIKDRRFTSDKFFFHVPITLNYQAANSPSKFNQRVNAYLKEHPETPIIGADRGERNLIYITVIDSTGKILEQRSLNTIQQFDYQKKLDNREKERVAARQAWSVVGTIKDLKQGYLSQVIHEIVDLMIHYQAVVVLENLNFGFKSKRTGIAEKAVYQQFEKMLIDKLNCLVLKDYPAEKVGGVLNPYQLTDQFTSFAKMGTQSGFLFYVPAPYTSKIDPLTGFVDPFVWKTIKNHESRKHFLEGFDFLHYDVKTGDFILHFKMNRNLSFQRGLPGFMPAWDIVFEKNETQFDAKGTPFIAGKRIVPVIENHRFTGRYRDLYPANELIALLEEKGIVFRDGSNILPKLLENDDSHAIDTMVALIRSVLQMRNSNAATGEDYINSPVRDLNGVCFDSRFQNPEWPMDADANGAYHIALKGQLLLNHLKESKDLKLQNGISNQDWLAYIQELRN

SEQ ID NO: 241 - protein, 1307 aa, Artificial Sequence
  SYNTHETIC
MTQFEGFTNLYQVSKTLRFELIPQGKTLKHIQEQGFIEEDKARNDHYKELKPIIDRIYKTYADQCLQLVQLDWENLSAAIDSYRKEKTEETRNALIEEQATYRNAIHDYFIGRTDNLTDAINKRHAEIYKGLFKAELFNGKVLKQLGTVTTTEHENALLRSFDKFTTYFSGFYENRKNVFSAEDISTAIPHRIVQDNFPKFKENCHIFTRLITAVPSLREHFENVKKAIGIFVSTSIEEVFSFPFYNQLLTQTQIDLYNQLLGGISREAGTEKIKGLNEVLNLAIQKNDETAHIIASLPHRFIPLFKQILSDRNTLSFILEEFKSDEEVIQSFCKYKTLLRNENVLETAEALFNELNSIDLTHIFISHKKLETISSALCDHWDTLRNALYERRISELTGKITKSAKEKVQRSLKHEDINLQEIISAAGKELSEAFKQKTSEILSHAHAALDQPLPTTLKKQEEKEILKSQLDSLLGLYHLLDWFAVDESNEVDPEFSARLTGIKLEMEPSLSFYNKARNYATKKPYSVEKFKLNFQMPTLASGWDVNKEKNNGAILFVKNGLYYLGIMPKQKGRYKALSFEPTEKTSEGFDKMYYDYFPDAAKMIPKCSTQLKAVTAHFQTHTTPILLSNNFIEPLEITKEIYDLNNPEKEPKKFQTAYAKKTGDQKGYREALCKWIDFTRDFLSKYTKTTSIDLSSLRPSSQYKDLGEYYAELNPLLYHISFQRIAEKEIMDAVETGKLYLFQIYNKDFAKGHHGKPNLHTLYWTGLFSPENLAKTSIKLNGQAELFYRPKSRMKRMAHRLGEKMLNKKLKDQKTPIPDTLYQELYDYVNHRLSHDLSDEARALLPNVITKEVSHEIIKDRRFTSDKFFFHVPITLNYQAANSPSKFNQRVNAYLKEHPETPIIGVDRGERNLIYITVIDSTGKILEQRSLNTIQQFDYQKKLDNREKERVAARQAWSVVGTIKDLKQGYLSQVIHEIVDLMIHYQAVVVLENLNFGFKSKRTGIAEKAVYQQFEKMLIDKLNCLVLKDYPAEKVGGVLNPYQLTDQFTSFAKMGTQSGFLFYVPAPYTSKIDPLTGFVDPFVWKTIKNHESRKHFLEGFDFLHYDVKTGDFILHFKMNRNLSFQRGLPGFMPAWDIVFEKNETQFDAKGTPFIAGKRIVPVIENHRFTGRYRDLYPANELIALLEEKGIVFRDGSNILPKLLENDDSHAIDTMVALIRSVLQMRNSNAATGEDYINSPVRDLNGVCFDSRFQNPEWPMDADANGAYHIALKGQLLLNHLKESKDLKLQNGISNQDWLAYIQELRN

SEQ ID NO: 242 - protein, 1307 aa, Artificial Sequence
  SYNTHETIC
MTQFEGFTNLYQVSKTLRFELIPQGKTLKHIQEQGFIEEDKARNDHYKELKPIIDRIYKTYADQCLQLVQLDWENLSAAIDSYRKEKTEETRNALIEEQATYRNAIHDYFIGRTDNLTDAINKRHAEIYKGLFKAELFNGKVLKQLGTVTTTEHENALLRSFDKFTTYFSGFYENRKNVFSAEDISTAIPHRIVQDNFPKFKENCHIFTRLITAVPSLREHFENVKKAIGIFVSTSIEEVFSFPFYNQLLTQTQIDLYNQLLGGISREAGTEKIKGLNEVLNLAIQKNDETAHIIASLPHRFIPLFKQILSDRNTLSFILEEFKSDEEVIQSFCKYKTLLRNENVLETAEALFNELNSIDLTHIFISHKKLETISSALCDHWDTLRNALYERRISELTGKITKSAKEKVQRSLKHEDINLQEIISAAGKELSEAFKQKTSEILSHAHAALDQPLPTTLKKQEEKEILKSQLDSLLGLYHLLDWFAVDESNEVDPEFSARLTGIKLEMEPSLSFYNKARNYATKKPYSVEKFKLNFQMPTLASGWDVNKEKNNGAILFVKNGLYYLGIMPKQKGRYKALSFEPTEKTSEGFDKMYYDYFPDAAKMIPKCSTQLKAVTAHFQTHTTPILLSNNFIEPLEITKEIYDLNNPEKEPKKFQTAYAKKTGDQKGYREALCKWIDFTRDFLSKYTKTTSIDLSSLRPSSQYKDLGEYYAELNPLLYHISFQRIAEKEIMDAVETGKLYLFQIYNKDFAKGHHGKPNLHTLYWTGLFSPENLAKTSIKLNGQAELFYRPKSRMKRMAHRLGEKMLNKKLKDQKTPIPDTLYQELYDYVNHRLSHDLSDEARALLPNVITKEVSHEIIKDRRFTSDKFFFHVPITLNYQAANSPSKFNQRVNAYLKEHPETPIIGIDRGEANLIYITVIDSTGKILEQRSLNTIQQFDYQKKLDNREKERVAARQAWSVVGTIKDLKQGYLSQVIHEIVDLMIHYQAVVVLENLNFGFKSKRTGIAEKAVYQQFEKMLIDKLNCLVLKDYPAEKVGGVLNPYQLTDQFTSFAKMGTQSGFLFYVPAPYTSKIDPLTGFVDPFVWKTIKNHESRKHFLEGFDFLHYDVKTGDFILHFKMNRNLSFQRGLPGFMPAWDIVFEKNETQFDAKGTPFIAGKRIVPVIENHRFTGRYRDLYPANELIALLEEKGIVFRDGSNILPKLLENDDSHAIDTMVALIRSVLQMRNSNAATGEDYINSPVRDLNGVCFDSRFQNPEWPMDADANGAYHIALKGQLLLNHLKESKDLKLQNGISNQDWLAYIQELRN

SEQ ID NO: 243 - protein, 1307 aa, Artificial Sequence
  SYNTHETIC
MTQFEGFTNLYQVSKTLRFELIPQGKTLKHIQEQGFIEEDKARNDHYKELKPIIDRIYKTYADQCLQLVQLDWENLSAAIDSYRKEKTEETRNALIEEQATYRNAIHDYFIGRTDNLTDAINKRHAEIYKGLFKAELFNGKVLKQLGTVTTTEHENALLRSFDKFTTYFSGFYENRKNVFSAEDISTAIPHRIVQDNFPKFKENCHIFTRLITAVPSLREHFENVKKAIGIFVSTSIEEVFSFPFYNQLLTQTQIDLYNQLLGGISREAGTEKIKGLNEVLNLAIQKNDETAHIIASLPHRFIPLFKQILSDRNTLSFILEEFKSDEEVIQSFCKYKTLLRNENVLETAEALFNELNSIDLTHIFISHKKLETISSALCDHWDTLRNALYERRISELTGKITKSAKEKVQRSLKHEDINLQEIISAAGKELSEAFKQKTSEILSHAHAALDQPLPTTLKKQEEKEILKSQLDSLLGLYHLLDWFAVDESNEVDPEFSARLTGIKLEMEPSLSFYNKARNYATKKPYSVEKFKLNFQMPTLASGWDVNKEKNNGAILFVKNGLYYLGIMPKQKGRYKALSFEPTEKTSEGFDKMYYDYFPDAAKMIPKCSTQLKAVTAHFQTHTTPILLSNNFIEPLEITKEIYDLNNPEKEPKKFQTAYAKKTGDQKGYREALCKWIDFTRDFLSKYTKTTSIDLSSLRPSSQYKDLGEYYAELNPLLYHISFQRIAEKEIMDAVETGKLYLFQIYNKDFAKGHHGKPNLHTLYWTGLFSPENLAKTSIKLNGQAELFYRPKSRMKRMAHRLGEKMLNKKLKDQKTPIPDTLYQELYDYVNHRLSHDLSDEARALLPNVITKEVSHEIIKDRRFTSDKFFFHVPITLNYQAANSPSKFNQRVNAYLKEHPETPIIGIDRGELNLIYITVIDSTGKILEQRSLNTIQQFDYQKKLDNREKERVAARQAWSVVGTIKDLKQGYLSQVIHEIVDLMIHYQAVVVLENLNFGFKSKRTGIAEKAVYQQFEKMLIDKLNCLVLKDYPAEKVGGVLNPYQLTDQFTSFAKMGTQSGFLFYVPAPYTSKIDPLTGFVDPFVWKTIKNHESRKHFLEGFDFLHYDVKTGDFILHFKMNRNLSFQRGLPGFMPAWDIVFEKNETQFDAKGTPFIAGKRIVPVIENHRFTGRYRDLYPANELIALLEEKGIVFRDGSNILPKLLENDDSHAIDTMVALIRSVLQMRNSNAATGEDYINSPVRDLNGVCFDSRFQNPEWPMDADANGAYHIALKGQLLLNHLKESKDLKLQNGISNQDWLAYIQELRN

SEQ ID NO: 244 - protein, 1307 aa, Artificial Sequence
  SYNTHETIC
MTQFEGFTNLYQVSKTLRFELIPQGKTLKHIQEQGFIEEDKARNDHYKELKPIIDRIYKTYADQCLQLVQLDWENLSAAIDSYRKEKTEETRNALIEEQATYRNAIHDYFIGRTDNLTDAINKRHAEIYKGLFKAELFNGKVLKQLGTVTTTEHENALLRSFDKFTTYFSGFYENRKNVFSAEDISTAIPHRIVQDNFPKFKENCHIFTRLITAVPSLREHFENVKKAIGIFVSTSIEEVFSFPFYNQLLTQTQIDLYNQLLGGISREAGTEKIKGLNEVLNLAIQKNDETAHIIASLPHRFIPLFKQILSDRNTLSFILEEFKSDEEVIQSFCKYKTLLRNENVLETAEALFNELNSIDLTHIFISHKKLETISSALCDHWDTLRNALYERRISELTGKITKSAKEKVQRSLKHEDINLQEIISAAGKELSEAFKQKTSEILSHAHAALDQPLPTTLKKQEEKEILKSQLDSLLGLYHLLDWFAVDESNEVDPEFSARLTGIKLEMEPSLSFYNKARNYATKKPYSVEKFKLNFQMPTLASGWDVNKEKNNGAILFVKNGLYYLGIMPKQKGRYKALSFEPTEKTSEGFDKMYYDYFPDAAKMIPKCSTQLKAVTAHFQTHTTPILLSNNFIEPLEITKEIYDLNNPEKEPKKFQTAYAKKTGDQKGYREALCKWIDFTRDFLSKYTKTTSIDLSSLRPSSQYKDLGEYYAELNPLLYHISFQRIAEKEIMDAVETGKLYLFQIYNKDFAKGHHGKPNLHTLYWTGLFSPENLAKTSIKLNGQAELFYRPKSRMKRMAHRLGEKMLNKKLKDQKTPIPDTLYQELYDYVNHRLSHDLSDEARALLPNVITKEVSHEIIKDRRFTSDKFFFHVPITLNYQAANSPSKFNQRVNAYLKEHPETPIIGIDRGESNLIYITVIDSTGKILEQRSLNTIQQFDYQKKLDNREKERVAARQAWSVVGTIKDLKQGYLSQVIHEIVDLMIHYQAVVVLENLNFGFKSKRTGIAEKAVYQQFEKMLIDKLNCLVLKDYPAEKVGGVLNPYQLTDQFTSFAKMGTQSGFLFYVPAPYTSKIDPLTGFVDPFVWKTIKNHESRKHFLEGFDFLHYDVKTGDFILHFKMNRNLSFQRGLPGFMPAWDIVFEKNETQFDAKGTPFIAGKRIVPVIENHRFTGRYRDLYPANELIALLEEKGIVFRDGSNILPKLLENDDSHAIDTMVALIRSVLQMRNSNAATGEDYINSPVRDLNGVCFDSRFQNPEWPMDADANGAYHIALKGQLLLNHLKESKDLKLQNGISNQDWLAYIQELRN

SEQ ID NO: 245 - protein, 1307 aa, Artificial Sequence
  SYNTHETIC
MTQFEGFTNLYQVSKTLRFELIPQGKTLKHIQEQGFIEEDKARNDHYKELKPIIDRIYKTYADQCLQLVQLDWENLSAAIDSYRKEKTEETRNALIEEQATYRNAIHDYFIGRTDNLTDAINKRHAEIYKGLFKAELFNGKVLKQLGTVTTTEHENALLRSFDKFTTYFSGFYENRKNVFSAEDISTAIPHRIVQDNFPKFKENCHIFTRLITAVPSLREHFENVKKAIGIFVSTSIEEVFSFPFYNQLLTQTQIDLYNQLLGGISREAGTEKIKGLNEVLNLAIQKNDETAHIIASLPHRFIPLFKQILSDRNTLSFILEEFKSDEEVIQSFCKYKTLLRNENVLETAEALFNELNSIDLTHIFISHKKLETISSALCDHWDTLRNALYERRISELTGKITKSAKEKVQRSLKHEDINLQEIISAAGKELSEAFKQKTSEILSHAHAALDQPLPTTLKKQEEKEILKSQLDSLLGLYHLLDWFAVDESNEVDPEFSARLTGIKLEMEPSLSFYNKARNYATKKPYSVEKFKLNFQMPTLASGWDVNKEKNNGAILFVKNGLYYLGIMPKQKGRYKALSFEPTEKTSEGFDKMYYDYFPDAAKMIPKCSTQLKAVTAHFQTHTTPILLSNNFIEPLEITKEIYDLNNPEKEPKKFQTAYAKKTGDQKGYREALCKWIDFTRDFLSKYTKTTSIDLSSLRPSSQYKDLGEYYAELNPLLYHISFQRIAEKEIMDAVETGKLYLFQIYNKDFAKGHHGKPNLHTLYWTGLFSPENLAKTSIKLNGQAELFYRPKSRMKRMAHRLGEKMLNKKLKDQKTPIPDTLYQELYDYVNHRLSHDLSDEARALLPNVITKEVSHEIIKDRRFTSDKFFFHVPITLNYQAANSPSKFNQRVNAYLKEHPETPIIGIDRGEVNLIYITVIDSTGKILEQRSLNTIQQFDYQKKLDNREKERVAARQAWSVVGTIKDLKQGYLSQVIHEIVDLMIHYQAVVVLENLNFGFKSKRTGIAEKAVYQQFEKMLIDKLNCLVLKDYPAEKVGGVLNPYQLTDQFTSFAKMGTQSGFLFYVPAPYTSKIDPLTGFVDPFVWKTIKNHESRKHFLEGFDFLHYDVKTGDFILHFKMNRNLSFQRGLPGFMPAWDIVFEKNETQFDAKGTPFIAGKRIVPVIENHRFTGRYRDLYPANELIALLEEKGIVFRDGSNILPKLLENDDSHAIDTMVALIRSVLQMRNSNAATGEDYINSPVRDLNGVCFDSRFQNPEWPMDADANGAYHIALKGQLLLNHLKESKDLKLQNGISNQDWLAYIQELRN

SEQ ID NO: 246 - DNA, 39 bp, Artificial Sequence
  SYNTHETIC
  misc_feature (19)..(20): n is a, c, g, or t
gaccccgagttctccgccnnkctgacaggcatcaaactg

SEQ ID NO: 247 - DNA, 38 bp, Artificial Sequence
  SYNTHETIC
  misc_feature (23)..(24): n is a, c, g, or t
ggaccccgagttctccgccagannkacaggcatcaaac

SEQ ID NO: 248 - DNA, 41 bp, Artificial Sequence
  SYNTHETIC
  misc_feature (20)..(21): n is a, c, g, or t
cgagttctccgccagactgnnkggcatcaaactggaaatgg

SEQ ID NO: 249 - DNA, 45 bp, Artificial Sequence
  SYNTHETIC
  misc_feature (22)..(23): n is a, c, g, or t
gagttctccgccagactgacannkatcaaactggaaatggaaccc

SEQ ID NO: 250 - DNA, 41 bp, Artificial Sequence
  SYNTHETIC
  misc_feature (20)..(21): n is a, c, g, or t
ctccgccagactgacaggcnnkaaactggaaatggaaccca

SEQ ID NO: 251 - DNA, 39 bp, Artificial Sequence
  SYNTHETIC
  misc_feature (19)..(20): n is a, c, g, or t
gccagactgacaggcatcnnkctggaaatggaacccagc

SEQ ID NO: 252 - DNA, 43 bp, Artificial Sequence
  SYNTHETIC
  misc_feature (21)..(22): n is a, c, g, or t
ccagactgacaggcatcaaannkgaaatggaacccagcctgtc

SEQ ID NO: 253 - DNA, 43 bp, Artificial Sequence
  SYNTHETIC
  misc_feature (21)..(22): n is a, c, g, or t
gactgacaggcatcaaactgnnkatggaacccagcctgtcctt

SEQ ID NO: 254 - DNA, 45 bp, Artificial Sequence
  SYNTHETIC
  misc_feature (22)..(23): n is a, c, g, or t
ctgacaggcatcaaactggaannkgaacccagcctgtccttctac

SEQ ID NO: 255 - DNA, 42 bp, Artificial Sequence
  SYNTHETIC
  misc_feature (25)..(26): n is a, c, g, or t
ctgacaggcatcaaactggaaatgnnkcccagcctgtccttc

SEQ ID NO: 256 - DNA, 47 bp, Artificial Sequence
  SYNTHETIC
  misc_feature (30)..(31): n is a, c, g, or t
gactgacaggcatcaaactggaaatggaannkagcctgtccttctac

SEQ ID NO: 257 - DNA, 45 bp, Artificial Sequence
  SYNTHETIC
  misc_feature (22)..(23): n is a, c, g, or t
atcaaactggaaatggaacccnnkctgtccttctacaacaaggcc

SEQ ID NO: 258 - DNA, 45 bp, Artificial Sequence
  SYNTHETIC
  misc_feature (22)..(23): n is a, c, g, or t
aaactggaaatggaacccagcnnktccttctacaacaaggccaga

SEQ ID NO: 259 - DNA, 45 bp, Artificial Sequence
  SYNTHETIC
  misc_feature (22)..(23): n is a, c, g, or t
ctggaaatggaacccagcctgnnkttctacaacaaggccagaaac

SEQ ID NO: 260 - DNA, 45 bp, Artificial Sequence
  SYNTHETIC
  misc_feature (22)..(23): n is a, c, g, or t
gaaatggaacccagcctgtccnnktacaacaaggccagaaactac

SEQ ID NO: 261 - DNA, 41 bp, Artificial Sequence
  SYNTHETIC
  misc_feature (20)..(21): n is a, c, g, or t
ggaacccagcctgtccttcnnkaacaaggccagaaactacg

SEQ ID NO: 262 - DNA, 39 bp, Artificial Sequence
  SYNTHETIC
  misc_feature (19)..(20): n is a, c, g, or t
cccagcctgtccttctacnnkaaggccagaaactacgcc

SEQ ID NO: 263 - DNA, 41 bp, Artificial Sequence
  SYNTHETIC
  misc_feature (20)..(21): n is a, c, g, or t
cagcctgtccttctacaacnnkgccagaaactacgccacca

SEQ ID NO: 264 - DNA, 47 bp, Artificial Sequence
  SYNTHETIC
  misc_feature (23)..(24): n is a, c, g, or t
cagcctgtccttctacaacaagnnkagaaactacgccaccaagaaac

SEQ ID NO: 265 - DNA, 45 bp, Artificial Sequence
  SYNTHETIC
  misc_feature (22)..(23): n is a, c, g, or t
ctgtccttctacaacaaggccnnkaactacgccaccaagaaaccc

SEQ ID NO: 266 - DNA, 45 bp, Artificial Sequence
  SYNTHETIC
  misc_feature (22)..(23): n is a, c, g, or t
tccttctacaacaaggccagannktacgccaccaagaaaccctac

SEQ ID NO: 267 - DNA, 45 bp, Artificial Sequence
  SYNTHETIC
  misc_feature (22)..(23): n is a, c, g, or t
ttctacaacaaggccagaaacnnkgccaccaagaaaccctacagc

SEQ ID NO: 268 - DNA, 45 bp, Artificial Sequence
  SYNTHETIC
  misc_feature (22)..(23): n is a, c, g, or t
tacaacaaggccagaaactacnnkaccaagaaaccctacagcgtg

SEQ ID NO: 269 - DNA, 41 bp, Artificial Sequence
  SYNTHETIC
  misc_feature (20)..(21): n is a, c, g, or t
caaggccagaaactacgccnnkaagaaaccctacagcgtgg

SEQ ID NO: 270 - DNA, 41 bp, Artificial Sequence
  SYNTHETIC
  misc_feature (20)..(21): n is a, c, g, or t
ggccagaaactacgccaccnnkaaaccctacagcgtggaaa

SEQ ID NO: 271 - DNA, 43 bp, Artificial Sequence
  SYNTHETIC
  misc_feature (21)..(22): n is a, c, g, or t
ccagaaactacgccaccaagnnkccctacagcgtggaaaagtt

SEQ ID NO: 272 - DNA, 49 bp, Artificial Sequence
  SYNTHETIC
  misc_feature (26)..(27): n is a, c, g, or t
ggccagaaactacgccaccaagaaannktacagcgtggaaaagtttaag

SEQ ID NO: 273 - DNA, 45 bp, Artificial Sequence
  SYNTHETIC
  misc_feature (22)..(23): n is a, c, g, or t
aactacgccaccaagaaacccnnkagcgtggaaaagtttaagctg

SEQ ID NO: 274 - DNA, 48 bp, Artificial Sequence
  SYNTHETIC
  misc_feature (23)..(24): n is a, c, g, or t
ctacgccaccaagaaaccctacnnkgtggaaaagtttaagctgaactt

SEQ ID NO: 275 - DNA, 47 bp, Artificial Sequence
  SYNTHETIC
  misc_feature (23)..(24): n is a, c, g, or t
cgccaccaagaaaccctacagcnnkgaaaagtttaagctgaacttcc

SEQ ID NO: 276 - DNA, 47 bp, Artificial Sequence
  SYNTHETIC
  misc_feature (23)..(24): n is a, c, g, or t
caccaagaaaccctacagcgtgnnkaagtttaagctgaacttccaga

SEQ ID NO: 277 - DNA, 47 bp, Artificial Sequence
  SYNTHETIC
  misc_feature (23)..(24): n is a, c, g, or t
caagaaaccctacagcgtggaannktttaagctgaacttccagatgc

SEQ ID NO: 278 - DNA, 45 bp, Artificial Sequence
  SYNTHETIC
  misc_feature (22)..(23): n is a, c, g, or t
aaaccctacagcgtggaaaagnnkaagctgaacttccagatgccc

SEQ ID NO: 279 - DNA, 44 bp, Artificial Sequence
  SYNTHETIC
  misc_feature (22)..(23): n is a, c, g, or t
ccctacagcgtggaaaagtttnnkctgaacttccagatgcccac

SEQ ID NO: 280 - DNA, 45 bp, Artificial Sequence
  SYNTHETIC
  misc_feature (22)..(23): n is a, c, g, or t
tacagcgtggaaaagtttaagnnkaacttccagatgcccaccctg

SEQ ID NO: 281 - DNA, 43 bp, Artificial Sequence
  SYNTHETIC
  misc_feature (21)..(22): n is a, c, g, or t
gcgtggaaaagtttaagctgnnkttccagatgcccaccctggc

SEQ ID NO: 282 - DNA, 45 bp, Artificial Sequence
  SYNTHETIC
  misc_feature (23)..(24): n is a, c, g, or t
cgtggaaaagtttaagctgaacnnkcagatgcccaccctggccag

SEQ ID NO: 283 - DNA, 44 bp, Artificial Sequence
  SYNTHETIC
  misc_feature (23)..(24): n is a, c, g, or t
ggaaaagtttaagctgaacttcnnkatgcccaccctggccagcg

SEQ ID NO: 284 - DNA, 37 bp, Artificial Sequence
  SYNTHETIC
  misc_feature (18)..(19): n is a, c, g, or t
ttaagctgaacttccagnnkcccaccctggccagcgg

SEQ ID NO: 285 - DNA, 37 bp, Artificial Sequence
  SYNTHETIC
  misc_feature (19)..(20): n is a, c, g, or t
aagctgaacttccagatgnnkaccctggccagcggct

SEQ ID NO: 286 - DNA, 35 bp, Artificial Sequence
  SYNTHETIC
  misc_feature (17)..(18): n is a, c, g, or t
gaacttccagatgcccnnkctggccagcggctggg

SEQ ID NO: 287 - DNA, 33 bp, Artificial Sequence
  SYNTHETIC
  misc_feature (16)..(17): n is a, c, g, or t
ttccagatgcccaccnnkgccagcggctgggac

SEQ ID NO: 288 - DNA, 33 bp, Artificial Sequence
  SYNTHETIC
  misc_feature (16)..(17): n is a, c, g, or t
cagatgcccaccctgnnkagcggctgggacgtg

SEQ ID NO: 289 - DNA, 35 bp, Artificial Sequence
  SYNTHETIC
  misc_feature (16)..(17): n is a, c, g, or t
atgcccaccctggccnnkggctgggacgtgaacaa

SEQ ID NO: 290 - DNA, 35 bp, Artificial Sequence
  SYNTHETIC
  misc_feature (17)..(18): n is a, c, g, or t
gcccaccctggccagcnnktgggacgtgaacaaag

SEQ ID NO: 291 - DNA, 38 bp, Artificial Sequence
  SYNTHETIC
  misc_feature (18)..(19): n is a, c, g, or t
ccaccctggccagcggcnnkgacgtgaacaaagagaag

SEQ ID NO: 292 - DNA, 38 bp, Artificial Sequence
  SYNTHETIC
  misc_feature (18)..(19): n is a, c, g, or t
ccctggccagcggctggnnkgtgaacaaagagaagaac

SEQ ID NO: 293 - DNA, 40 bp, Artificial Sequence
  SYNTHETIC
  misc_feature (19)..(20): n is a, c, g, or t
ctggccagcggctgggacnnkaacaaagagaagaacaacg

SEQ ID NO: 294 - DNA, 38 bp, Artificial Sequence
  SYNTHETIC
  misc_feature (18)..(19): n is a, c, g, or t
ccagcggctgggacgtgnnkaaagagaagaacaacggc

SEQ ID NO: 295 - DNA, 37 bp, Artificial Sequence
  SYNTHETIC
  misc_feature (18)..(19): n is a, c, g, or t
gcggctgggacgtgaacnnkgagaagaacaacggcgc

SEQ ID NO: 296 - DNA, 40 bp, Artificial Sequence
  SYNTHETIC
  misc_feature (20)..(21): n is a, c, g, or t
cggctgggacgtgaacaaannkaagaacaacggcgccatc

SEQ ID NO: 297 - DNA, 41 bp, Artificial Sequence
  SYNTHETIC
  misc_feature (20)..(21): n is a, c, g, or t
ctgggacgtgaacaaagagnnkaacaacggcgccatcctgt

SEQ ID NO: 298 - DNA, 42 bp, Artificial Sequence
  SYNTHETIC
  misc_feature (21)..(22): n is a, c, g, or t
gggacgtgaacaaagagaagnnkaacggcgccatcctgttcg

SEQ ID NO: 299 - DNA, 44 bp, Artificial Sequence
  SYNTHETIC
  misc_feature (22)..(23): n is a, c, g, or t
gacgtgaacaaagagaagaacnnkggcgccatcctgttcgtgaa

SEQ ID NO: 300 - DNA, 47 bp, Artificial Sequence
  SYNTHETIC
  misc_feature (23)..(24): n is a, c, g, or t
cgtgaacaaagagaagaacaacnnkgccatcctgttcgtgaagaacg

SEQ ID NO: 301 - DNA, 47 bp, Artificial Sequence
  SYNTHETIC
  misc_feature (23)..(24): n is a, c, g, or t
gaacaaagagaagaacaacggcnnkatcctgttcgtgaagaacggac

SEQ ID NO: 302 - DNA, 41 bp, Artificial Sequence
  SYNTHETIC
  misc_feature (20)..(21): n is a, c, g, or t
agagaagaacaacggcgccnnkctgttcgtgaagaacggac

SEQ ID NO: 303 - DNA, 45 bp, Artificial Sequence
  SYNTHETIC
  misc_feature (22)..(23): n is a, c, g, or t
gagaagaacaacggcgccatcnnkttcgtgaagaacggactgtac

SEQ ID NO: 304 - DNA, 41 bp, Artificial Sequence
  SYNTHETIC
  misc_feature (20)..(21): n is a, c, g, or t
gaacaacggcgccatcctgnnkgtgaagaacggactgtact

SEQ ID NO: 305 - DNA, 41 bp, Artificial Sequence
  SYNTHETIC
  misc_feature (20)..(21): n is a, c, g, or t
caacggcgccatcctgttcnnkaagaacggactgtactacc

SEQ ID NO: 306 - DNA, 39 bp, Artificial Sequence
  SYNTHETIC
  misc_feature (19)..(20): n is a, c, g, or t
ggcgccatcctgttcgtgnnkaacggactgtactacctg

SEQ ID NO: 307 - DNA, 39 bp, Artificial Sequence
  SYNTHETIC
  misc_feature (19)..(20): n is a, c, g, or t
gccatcctgttcgtgaagnnkggactgtactacctgggc

SEQ ID NO: 308 - DNA, 45 bp, Artificial Sequence
  SYNTHETIC
  misc_feature (22)..(23): n is a, c, g, or t
gccatcctgttcgtgaagaacnnkctgtactacctgggcatcatg

SEQ ID NO: 309 - DNA, 43 bp, Artificial Sequence
  SYNTHETIC
  misc_feature (21)..(22): n is a, c, g, or t
tcctgttcgtgaagaacggannktactacctgggcatcatgcc

SEQ ID NO: 310 - DNA, 45 bp, Artificial Sequence
  SYNTHETIC
  misc_feature (22)..(23): n is a, c, g, or t
ctgttcgtgaagaacggactgnnktacctgggcatcatgcctaag

SEQ ID NO: 311 - DNA, 41 bp, Artificial Sequence
  SYNTHETIC
  misc_feature (20)..(21): n is a, c, g, or t
cgtgaagaacggactgtacnnkctgggcatcatgcctaagc

SEQ ID NO: 312 - DNA, 45 bp, Artificial Sequence
  SYNTHETIC
  misc_feature (22)..(23): n is a, c, g, or t
gtgaagaacggactgtactacnnkggcatcatgcctaagcagaag

SEQ ID NO: 313 - DNA, 45 bp, Artificial Sequence
  SYNTHETIC
  misc_feature (22)..(23): n is a, c, g, or t
aagaacggactgtactacctgnnkatcatgcctaagcagaagggc

SEQ ID NO: 314 - DNA, 39 bp, Artificial Sequence
  SYNTHETIC
  misc_feature (19)..(20): n is a, c, g, or t
ggactgtactacctgggcnnkatgcctaagcagaagggc

SEQ ID NO: 315 - DNA, 43 bp, Artificial Sequence
  SYNTHETIC
  misc_feature (21)..(22): n is a, c, g, or t
gactgtactacctgggcatcnnkcctaagcagaagggcagata

SEQ ID NO: 316 - DNA, 45 bp, Artificial Sequence
  SYNTHETIC
  misc_feature (22)..(23): n is a, c, g, or t
ctgtactacctgggcatcatgnnkaagcagaagggcagatacaag

SEQ ID NO: 317 - DNA, 41 bp, Artificial Sequence
  SYNTHETIC
  misc_feature (20)..(21): n is a, c, g, or t
ctacctgggcatcatgcctnnkcagaagggcagatacaagg

SEQ ID NO: 318 - DNA, 41 bp, Artificial Sequence
  SYNTHETIC
  misc_feature (20)..(21): n is a, c, g, or t
cctgggcatcatgcctaagnnkaagggcagatacaaggccc

SEQ ID NO: 319 - DNA, 39 bp, Artificial Sequence
  SYNTHETIC
  misc_feature (19)..(20): n is a, c, g, or t
ggcatcatgcctaagcagnnkggcagatacaaggccctg

SEQ ID NO: 320 - DNA, 45 bp, Artificial Sequence
  SYNTHETIC
  misc_feature (22)..(23): n is a, c, g, or t
ggcatcatgcctaagcagaagnnkagatacaaggccctgtccttt

SEQ ID NO: 321 - DNA, 41 bp, Artificial Sequence
  SYNTHETIC
  misc_feature (20)..(21): n is a, c, g, or t
catgcctaagcagaagggcnnktacaaggccctgtcctttg

SEQ ID NO: 322 - DNA, 41 bp, Artificial Sequence
  SYNTHETIC
  misc_feature (20)..(21): n is a, c, g, or t
gcctaagcagaagggcagannkaaggccctgtcctttgagc

SEQ ID NO: 323 - DNA, 39 bp, Artificial Sequence
  SYNTHETIC
  misc_feature (19)..(20): n is a, c, g, or t
aagcagaagggcagatacnnkgccctgtcctttgagccc

SEQ ID NO: 324 - DNA, 41 bp, Artificial Sequence
  SYNTHETIC
  misc_feature (20)..(21): n is a, c, g, or t
gcagaagggcagatacaagnnkctgtcctttgagcccaccg

SEQ ID NO: 325 - DNA, 41 bp, Artificial Sequence
  SYNTHETIC
  misc_feature (20)..(21): n is a, c, g, or t
gaagggcagatacaaggccnnktcctttgagcccaccgaaa

SEQ ID NO: 326 - DNA, 41 bp, Artificial Sequence
  SYNTHETIC
  misc_feature (20)..(21): n is a, c, g, or t
gggcagatacaaggccctgnnktttgagcccaccgaaaaga

SEQ ID NO: 327 - DNA, 39 bp, Artificial Sequence
  SYNTHETIC
  misc_feature (19)..(20): n is a, c, g, or t
agatacaaggccctgtccnnkgagcccaccgaaaagacc

SEQ ID NO: 328 - DNA, 41 bp, Artificial Sequence
  SYNTHETIC
  misc_feature (25)..(26): n is a, c, g, or t
ggcagatacaaggccctgtcctttnnkcccaccgaaaagac

SEQ ID NO: 329 - DNA, 40 bp, Artificial Sequence
  SYNTHETIC
  misc_feature (20)..(21): n is a, c, g, or t
caaggccctgtcctttgagnnkaccgaaaagaccagcgag

SEQ ID NO: 330 - DNA, 39 bp, Artificial Sequence
  SYNTHETIC
  misc_feature (19)..(20): n is a, c, g, or t
ctgtcctttgagcccaccnnkaagaccagcgagggcttt

SEQ ID NO: 331 - DNA, 37 bp, Artificial Sequence
  SYNTHETIC
  misc_feature (18)..(19): n is a, c, g, or t
ccctgtcctttgagcccnnkgaaaagaccagcgaggg

SEQ ID NO: 332 - DNA, 38 bp, Artificial Sequence
  SYNTHETIC
  misc_feature (20)..(21): n is a, c, g, or t
gtcctttgagcccaccgaannkaccagcgagggctttg

SEQ ID NO: 333 - DNA, 41 bp, Artificial Sequence
  SYNTHETIC
  misc_feature (24)..(25): n is a, c, g, or t
tgtcctttgagcccaccgaaaagnnkagcgagggctttgac

SEQ ID NO: 334 - DNA, 45 bp, Artificial Sequence
  SYNTHETIC
  misc_feature (22)..(23): n is a, c, g, or t
tttgagcccaccgaaaagaccnnkgagggctttgacaagatgtac

SEQ ID NO: 335 - DNA, 45 bp, Artificial Sequence
  SYNTHETIC
  misc_feature (22)..(23): n is a, c, g, or t
gagcccaccgaaaagaccagcnnkggctttgacaagatgtactac

SEQ ID NO: 336 - DNA, 45 bp, Artificial Sequence
  SYNTHETIC
  misc_feature (22)..(23): n is a, c, g, or t
cccaccgaaaagaccagcgagnnktttgacaagatgtactacgat

SEQ ID NO: 337 - DNA, 46 bp, Artificial Sequence
  SYNTHETIC
  misc_feature (22)..(23): n is a, c, g, or t
accgaaaagaccagcgagggcnnkgacaagatgtactacgattact

SEQ ID NO: 338 - DNA, 48 bp, Artificial Sequence
  SYNTHETIC
  misc_feature (24)..(25): n is a, c, g, or t
ccgaaaagaccagcgagggctttnnkaagatgtactacgattacttcc

SEQ ID NO: 339 - DNA, 45 bp, Artificial Sequence
  SYNTHETIC
  misc_feature (22)..(23): n is a, c, g, or t
aagaccagcgagggctttgacnnkatgtactacgattacttcccc

SEQ ID NO: 340 - DNA, 43 bp, Artificial Sequence
  SYNTHETIC
  misc_feature (21)..(22): n is a, c, g, or t
ccagcgagggctttgacaagnnktactacgattacttccccga

SEQ ID NO: 341 - DNA, 43 bp, Artificial Sequence
  SYNTHETIC
  misc_feature (21)..(22): n is a, c, g, or t
gcgagggctttgacaagatgnnktacgattacttccccgacgc

SEQ ID NO: 342 - DNA, 41 bp, Artificial Sequence
  SYNTHETIC
  misc_feature (20)..(21): n is a, c, g, or t
gggctttgacaagatgtacnnkgattacttccccgacgccg

SEQ ID NO: 343 - DNA, 44 bp, Artificial Sequence
  SYNTHETIC
  misc_feature (22)..(23): n is a, c, g, or t
ggctttgacaagatgtactacnnktacttccccgacgccgccaa

SEQ ID NO: 344 - DNA, 43 bp, Artificial Sequence
  SYNTHETIC
  misc_feature (27)..(28): n is a, c, g, or t
agggctttgacaagatgtactacgatnnkttccccgacgccgc

SEQ ID NO: 345 - DNA, 45 bp, Artificial Sequence
  SYNTHETIC
  misc_feature (27)..(28): n is a, c, g, or t
gctttgacaagatgtactacgattacnnkcccgacgccgccaaga

SEQ ID NO: 346 - DNA, 48 bp, Artificial Sequence
  SYNTHETIC
  misc_feature (28)..(29): n is a, c, g, or t
tttgacaagatgtactacgattacttcnnkgacgccgccaagatgatc

SEQ ID NO: 347 - DNA, 41 bp, Artificial Sequence
  SYNTHETIC
  misc_feature (20)..(21): n is a, c, g, or t
gtactacgattacttccccnnkgccgccaagatgatcccca

SEQ ID NO: 348 - DNA, 43 bp, Artificial Sequence
  SYNTHETIC
  misc_feature (21)..(22): n is a, c, g, or t
actacgattacttccccgacnnkgccaagatgatccccaagtg

SEQ ID NO: 349 - DNA, 41 bp, Artificial Sequence
  SYNTHETIC
  misc_feature (20)..(21): n is a, c, g, or t
cgattacttccccgacgccnnkaagatgatccccaagtgca

SEQ ID NO: 350 - DNA, 35 bp, Artificial Sequence
  SYNTHETIC
  misc_feature (17)..(18): n is a, c, g, or t
cttccccgacgccgccnnkatgatccccaagtgca

SEQ ID NO: 351 - DNA, 33 bp, Artificial Sequence
  SYNTHETIC
  misc_feature (16)..(17): n is a, c, g, or t
cccgacgccgccaagnnkatccccaagtgcagc

SEQ ID NO: 352 - DNA, 35 bp, Artificial Sequence
  SYNTHETIC
  misc_feature (17)..(18): n is a, c, g, or t
cgacgccgccaagatgnnkcccaagtgcagcaccc

SEQ ID NO: 353 - DNA, 39 bp, Artificial Sequence
  SYNTHETIC
  misc_feature (19)..(20): n is a, c, g, or t
gacgccgccaagatgatcnnkaagtgcagcacccagctg

SEQ ID NO: 354 - DNA, 37 bp, Artificial Sequence
  SYNTHETIC
  misc_feature (18)..(19): n is a, c, g, or t
ccgccaagatgatccccnnktgcagcacccagctgaa

SEQ ID NO: 355 - DNA, 39 bp, Artificial Sequence
  SYNTHETIC
  misc_feature (19)..(20): n is a, c, g, or t
gccaagatgatccccaagnnkagcacccagctgaaggcc

SEQ ID NO: 356 - DNA, 39 bp, Artificial Sequence
  SYNTHETIC
  misc_feature (19)..(20): n is a, c, g, or t
aagatgatccccaagtgcnnkacccagctgaaggccgtg

SEQ ID NO: 357 - DNA, 37 bp, Artificial Sequence
  SYNTHETIC
  misc_feature (18)..(19): n is a, c, g, or t
tgatccccaagtgcagcnnkcagctgaaggccgtgac

SEQ ID NO: 358 - DNA, 35 bp, Artificial Sequence
  SYNTHETIC
  misc_feature (17)..(18): n is a, c, g, or t
ccccaagtgcagcaccnnkctgaaggccgtgaccg

SEQ ID NO: 359 - DNA, 33 bp, Artificial Sequence
  SYNTHETIC
  misc_feature (16)..(17): n is a, c, g, or t
tgcagcacccagctgnnkgccgtgaccgcccac

SEQ ID NO: 360 - DNA, 35 bp, Artificial Sequence
  SYNTHETIC
  misc_feature (17)..(18): n is a, c, g, or t
caagtgcagcacccagnnkaaggccgtgaccgccc

SEQ ID NO: 361 - DNA, 37 bp, Artificial Sequence
  SYNTHETIC
  misc_feature (18)..(19): n is a, c, g, or t
gcagcacccagctgaagnnkgtgaccgcccactttca

SEQ ID NO: 362 - DNA, 37 bp, Artificial Sequence
  SYNTHETIC
  misc_feature (18)..(19): n is a, c, g, or t
gcacccagctgaaggccnnkaccgcccactttcagac

SEQ ID NO: 363 - DNA, 35 bp, Artificial Sequence
  SYNTHETIC
  misc_feature (17)..(18): n is a, c, g, or t
ccagctgaaggccgtgnnkgcccactttcagaccc

SEQ ID NO: 364 - DNA, 39 bp, Artificial Sequence
  SYNTHETIC
  misc_feature (19)..(20): n is a, c, g, or t
cagctgaaggccgtgaccnnkcactttcagacccacacc

SEQ ID NO: 365 - DNA, 37 bp, Artificial Sequence
  SYNTHETIC
  misc_feature (18)..(19): n is a, c, g, or t
tgaaggccgtgaccgccnnktttcagacccacaccac

SEQ ID NO: 366 - DNA, 33 bp, Artificial Sequence
  SYNTHETIC
  misc_feature (16)..(17): n is a, c, g, or t
gccgtgaccgcccacnnkcagacccacaccacc

SEQ ID NO: 367 - DNA, 36 bp, Artificial Sequence
  SYNTHETIC
  misc_feature (22)..(23): n is a, c, g, or t
aaggccgtgaccgcccactttnnkacccacaccacc

SEQ ID NO: 368 - DNA, 35 bp, Artificial Sequence
  SYNTHETIC
  misc_feature (17)..(18): n is a, c, g, or t
gaccgcccactttcagnnkcacaccacccccatcc

SEQ ID NO: 369 - DNA, 35 bp, Artificial Sequence
  SYNTHETIC
  misc_feature (17)..(18): n is a, c, g, or t
cgcccactttcagaccnnkaccacccccatcctgc

SEQ ID NO: 370 - DNA, 37 bp, Artificial Sequence
  SYNTHETIC
  misc_feature (18)..(19): n is a, c, g, or t
cccactttcagacccacnnkacccccatcctgctgag

SEQ ID NO: 371 - DNA, 39 bp, Artificial Sequence
  SYNTHETIC
  misc_feature (19)..(20): n is a, c, g, or t
cactttcagacccacaccnnkcccatcctgctgagcaac

SEQ ID NO: 372 - DNA, 45 bp, Artificial Sequence
  SYNTHETIC
  misc_feature (22)..(23): n is a, c, g, or t
cactttcagacccacaccaccnnkatcctgctgagcaacaacttc

SEQ ID NO: 373 - DNA, 39 bp, Artificial Sequence
  SYNTHETIC
  misc_feature (19)..(20): n is a, c, g, or t
cagacccacaccacccccnnkctgctgagcaacaacttc

SEQ ID NO: 374 - DNA, 41 bp, Artificial Sequence
  SYNTHETIC
  misc_feature (20)..(21): n is a, c, g, or t
gacccacaccacccccatcnnkctgagcaacaacttcatcg

SEQ ID NO: 375 - DNA, 41 bp, Artificial Sequence
  SYNTHETIC
  misc_feature (20)..(21): n is a, c, g, or t
ccacaccacccccatcctgnnkagcaacaacttcatcgagc

SEQ ID NO: 376 - DNA, 39 bp, Artificial Sequence
  SYNTHETIC
  misc_feature (19)..(20): n is a, c, g, or t
accacccccatcctgctgnnkaacaacttcatcgagccc

SEQ ID NO: 377 - DNA, 37 bp, Artificial Sequence
  SYNTHETIC
  misc_feature (18)..(19): n is a, c, g, or t
cccccatcctgctgagcnnkaacttcatcgagcccct

SEQ ID NO: 378 - DNA, 39 bp, Artificial Sequence
  SYNTHETIC
  misc_feature (19)..(20): n is a, c, g, or t
cccatcctgctgagcaacnnkttcatcgagcccctggaa

SEQ ID NO: 379 - DNA, 43 bp, Artificial Sequence
  SYNTHETIC
  misc_feature (21)..(22): n is a, c, g, or t
ccatcctgctgagcaacaacnnkatcgagcccctggaaatcac

SEQ ID NO: 380 - DNA, 41 bp, Artificial Sequence
  SYNTHETIC
  misc_feature (20)..(21): n is a, c, g, or t
cctgctgagcaacaacttcnnkgagcccctggaaatcacca

SEQ ID NO: 381 - DNA, 46 bp, Artificial Sequence
  SYNTHETIC
  misc_feature (23)..(24): n is a, c, g, or t
cctgctgagcaacaacttcatcnnkcccctggaaatcaccaaagag

SEQ ID NO: 382 - DNA, 47 bp, Artificial Sequence
  SYNTHETIC
  misc_feature (23)..(24): n is a, c, g, or t
gctgagcaacaacttcatcgagnnkctggaaatcaccaaagagatct

SEQ ID NO: 383 - DNA, 47 bp, Artificial Sequence
  SYNTHETIC
  misc_feature (23)..(24): n is a, c, g, or t
gagcaacaacttcatcgagcccnnkgaaatcaccaaagagatctacg

SEQ ID NO: 384 - DNA, 45 bp, Artificial Sequence
  SYNTHETIC
  misc_feature (22)..(23): n is a, c, g, or t
aacaacttcatcgagcccctgnnkatcaccaaagagatctacgac

SEQ ID NO: 385 - DNA, 46 bp, Artificial Sequence
  SYNTHETIC
  misc_feature (25)..(26): n is a, c, g, or t
aacaacttcatcgagcccctggaannkaccaaagagatctacgacc

SEQ ID NO: 386 - DNA, 45 bp, Artificial Sequence
  SYNTHETIC
  misc_feature (22)..(23): n is a, c, g, or t
ttcatcgagcccctggaaatcnnkaaagagatctacgacctgaac

SEQ ID NO: 387 - DNA, 41 bp, Artificial Sequence
  SYNTHETIC
  misc_feature (20)..(21): n is a, c, g, or t
cgagcccctggaaatcaccnnkgagatctacgacctgaaca

SEQ ID NO: 388 - DNA, 39 bp, Artificial Sequence
  SYNTHETIC
  misc_feature (19)..(20): n is a, c, g, or t
ctgagccacgacctgtccnnkgaagctagagcactgctg

SEQ ID NO: 389 - DNA, 35 bp, Artificial Sequence
  SYNTHETIC
  misc_feature (17)..(18): n is a, c, g, or t
ccacgacctgtccgacnnkgctagagcactgctgc

SEQ ID NO: 390 - DNA, 37 bp, Artificial Sequence
  SYNTHETIC
  misc_feature (20)..(21): n is a, c, g, or t
ccacgacctgtccgacgaannkagagcactgctgccc

SEQ ID NO: 391 - DNA, 37 bp, Artificial Sequence
  SYNTHETIC
  misc_feature (19)..(20): n is a, c, g, or t
gacctgtccgacgaagctnnkgcactgctgcccaacg

SEQ ID NO: 392 - DNA, 39 bp, Artificial Sequence
  SYNTHETIC
  misc_feature (19)..(20): n is a, c, g, or t
ctgtccgacgaagctagannkctgctgcccaacgtgatc

SEQ ID NO: 393 - DNA, 41 bp, Artificial Sequence
  SYNTHETIC
  misc_feature (20)..(21): n is a, c, g, or t
gtccgacgaagctagagcannkctgcccaacgtgatcacaa

SEQ ID NO: 394 - DNA, 43 bp, Artificial Sequence
  SYNTHETIC
  misc_feature (21)..(22): n is a, c, g, or t
ccgacgaagctagagcactgnnkcccaacgtgatcacaaaaga

SEQ ID NO: 395 - DNA, 45 bp, Artificial Sequence
  SYNTHETIC
  misc_feature (22)..(23): n is a, c, g, or t
gacgaagctagagcactgctgnnkaacgtgatcacaaaagaggtg

SEQ ID NO: 396 - DNA, 43 bp, Artificial Sequence
  SYNTHETIC
  misc_feature (21)..(22): n is a, c, g, or t
aagctagagcactgctgcccnnkgtgatcacaaaagaggtgtc

SEQ ID NO: 397 - DNA, 43 bp, Artificial Sequence
  SYNTHETIC
  misc_feature (21)..(22): n is a, c, g, or t
ctagagcactgctgcccaacnnkatcacaaaagaggtgtccca

SEQ ID NO: 398 - DNA, 39 bp, Artificial Sequence
  SYNTHETIC
  misc_feature (19)..(20): n is a, c, g, or t
gcactgctgcccaacgtgnnkacaaaagaggtgtcccac

SEQ ID NO: 399 - DNA, 39 bp, Artificial Sequence
  SYNTHETIC
  misc_feature (19)..(20): n is a, c, g, or t
ctgctgcccaacgtgatcnnkaaagaggtgtcccacgag

SEQ ID NO: 400 - DNA, 39 bp, Artificial Sequence
  SYNTHETIC
  misc_feature (19)..(20): n is a, c, g, or t
ctgcccaacgtgatcacannkgaggtgtcccacgagatc

SEQ ID NO: 401 - DNA, 43 bp, Artificial Sequence
  SYNTHETIC
  misc_feature (27)..(28): n is a, c, g, or t
cactgctgcccaacgtgatcacaaaannkgtgtcccacgagat

SEQ ID NO: 402 - DNA, 46 bp, Artificial Sequence
  SYNTHETIC
  misc_feature (23)..(24): n is a, c, g, or t
gcccaacgtgatcacaaaagagnnktcccacgagatcatcaaggac

SEQ ID NO: 403 - DNA, 45 bp, Artificial Sequence
  SYNTHETIC
  misc_feature (22)..(23): n is a, c, g, or t
aacgtgatcacaaaagaggtgnnkcacgagatcatcaaggaccgg

SEQ ID NO: 404 - DNA, 43 bp, Artificial Sequence
  SYNTHETIC
  misc_feature (21)..(22): n is a, c, g, or t
tgatcacaaaagaggtgtccnnkgagatcatcaaggaccggcg

SEQ ID NO: 405 - DNA, 41 bp, Artificial Sequence
  SYNTHETIC
  misc_feature (20)..(21): n is a, c, g, or t
cacaaaagaggtgtcccacnnkatcatcaaggaccggcggt

SEQ ID NO: 406 - DNA, 43 bp, Artificial Sequence
  SYNTHETIC
  misc_feature (21)..(22): n is a, c, g, or t
caaaagaggtgtcccacgagnnkatcaaggaccggcggtttac

SEQ ID NO: 407 - DNA, 39 bp, Artificial Sequence
  SYNTHETIC
  misc_feature (19)..(20): n is a, c, g, or t
gaggtgtcccacgagatcnnkaaggaccggcggtttacc

SEQ ID NO: 408 - DNA, 38 bp, Artificial Sequence
  SYNTHETIC
  misc_feature (19)..(20): n is a, c, g, or t
gtgtcccacgagatcatcnnkgaccggcggtttacctc

SEQ ID NO: 409 - DNA, 39 bp, Artificial Sequence
  SYNTHETIC
  misc_feature (22)..(23): n is a, c, g, or t
gtgtcccacgagatcatcaagnnkcggcggtttacctcc

SEQ ID NO: 410 - DNA, 45 bp, Artificial Sequence
  SYNTHETIC
  misc_feature (22)..(23): n is a, c, g, or t
tcccacgagatcatcaaggacnnkcggtttacctccgataagttc

SEQ ID NO: 411 - DNA, 45 bp, Artificial Sequence
  SYNTHETIC
  misc_feature (22)..(23): n is a, c, g, or t
cacgagatcatcaaggaccggnnktttacctccgataagttcttc

SEQ ID NO: 412 - DNA, 45 bp, Artificial Sequence
  SYNTHETIC
  misc_feature (22)..(23): n is a, c, g, or t
gagatcatcaaggaccggcggnnkacctccgataagttcttcttc

SEQ ID NO: 413 - DNA, 46 bp, Artificial Sequence
  SYNTHETIC
  misc_feature (26)..(27): n is a, c, g, or t
cgagatcatcaaggaccggcggtttnnktccgataagttcttcttc

SEQ ID NO: 414 - DNA, 45 bp, Artificial Sequence
  SYNTHETIC
  misc_feature (22)..(23): n is a, c, g, or t
atcaaggaccggcggtttaccnnkgataagttcttcttccacgtg

SEQ ID NO: 415 - DNA, 41 bp, Artificial Sequence
  SYNTHETIC
  misc_feature (20)..(21): n is a, c, g, or t
ggaccggcggtttacctccnnkaagttcttcttccacgtgc

SEQ ID NO: 416 - DNA, 40 bp, Artificial Sequence
  SYNTHETIC
  misc_feature (20)..(21): n is a, c, g, or t
ccggcggtttacctccgatnnkttcttcttccacgtgccc

SEQ ID NO: 417 - DNA, 43 bp, Artificial Sequence
  SYNTHETIC
  misc_feature (21)..(22): n is a, c, g, or t
ggcggtttacctccgataagnnkttcttccacgtgcccatcac

SEQ ID NO: 418 - DNA, 43 bp, Artificial Sequence
  SYNTHETIC
  misc_feature (21)..(22): n is a, c, g, or t
ggtttacctccgataagttcnnkttccacgtgcccatcaccct

SEQ ID NO: 419 - DNA, 45 bp, Artificial Sequence
  SYNTHETIC
  misc_feature (22)..(23): n is a, c, g, or t
tttacctccgataagttcttcnnkcacgtgcccatcaccctgaac

SEQ ID NO: 420 - DNA, 45 bp, Artificial Sequence
  SYNTHETIC
  misc_feature (22)..(23): n is a, c, g, or t
acctccgataagttcttcttcnnkgtgcccatcaccctgaactac

SEQ ID NO: 421 - DNA, 45 bp, Artificial Sequence
  SYNTHETIC
  misc_feature (22)..(23): n is a, c, g, or t
tccgataagttcttcttccacnnkcccatcaccctgaactaccag

SEQ ID NO: 422 - DNA, 45 bp, Artificial Sequence
  SYNTHETIC
  misc_feature (22)..(23): n is a, c, g, or t
gataagttcttcttccacgtgnnkatcaccctgaactaccaggcc

SEQ ID NO: 423 - DNA, 39 bp, Artificial Sequence
  SYNTHETIC
  misc_feature (19)..(20): n is a, c, g, or t
ttcttcttccacgtgcccnnkaccctgaactaccaggcc

SEQ ID NO: 424 - DNA, 37 bp, Artificial Sequence
  SYNTHETIC
  misc_feature (18)..(19): n is a, c, g, or t
tcttccacgtgcccatcnnkctgaactaccaggccgc

SEQ ID NO: 425 - DNA, 35 bp, Artificial Sequence
  SYNTHETIC
  misc_feature (17)..(18): n is a, c, g, or t
ccacgtgcccatcaccnnkaactaccaggccgcca

SEQ ID NO: 426 - DNA, 35 bp, Artificial Sequence
  SYNTHETIC
  misc_feature (17)..(18): n is a, c, g, or t
cgtgcccatcaccctgnnktaccaggccgccaaca

SEQ ID NO: 427 - DNA, 35 bp, Artificial Sequence
  SYNTHETIC
  misc_feature (17)..(18): n is a, c, g, or t
gcccatcaccctgaacnnkcaggccgccaacagcc

SEQ ID NO: 428 - DNA, 36 bp, Artificial Sequence
  SYNTHETIC
  misc_feature (18)..(19): n is a, c, g, or t
ccatcaccctgaactacnnkgccgccaacagcccca

SEQ ID NO: 429 - DNA, 39 bp, Artificial Sequence
  SYNTHETIC
  misc_feature (19)..(20): n is a, c, g, or t
atcaccctgaactaccagnnkgccaacagccccagcaag

SEQ ID NO: 430 - DNA, 39 bp, Artificial Sequence
  SYNTHETIC
  misc_feature (19)..(20): n is a, c, g, or t
accctgaactaccaggccnnkaacagccccagcaagttc

SEQ ID NO: 431 - DNA, 39 bp, Artificial Sequence
  SYNTHETIC
  misc_feature (19)..(20): n is a, c, g, or t
ctgaactaccaggccgccnnkagccccagcaagttcaac

SEQ ID NO: 432 - DNA, 39 bp, Artificial Sequence
  SYNTHETIC
  misc_feature (19)..(20): n is a, c, g, or t
aactaccaggccgccaacnnkcccagcaagttcaaccag

SEQ ID NO: 433 - DNA, 41 bp, Artificial Sequence
  SYNTHETIC
  misc_feature (20)..(21): n is a, c, g, or t
ctaccaggccgccaacagcnnkagcaagttcaaccagagag

SEQ ID NO: 434 - DNA, 39 bp, Artificial Sequence
  SYNTHETIC
  misc_feature (19)..(20): n is a, c, g, or t
caggccgccaacagccccnnkaagttcaaccagagagtg

SEQ ID NO: 435 - DNA, 39 bp, Artificial Sequence
  SYNTHETIC
  misc_feature (19)..(20): n is a, c, g, or t
gccgccaacagccccagcnnkttcaaccagagagtgaac

SEQ ID NO: 436 - DNA, 39 bp, Artificial Sequence
  SYNTHETIC
  misc_feature (19)..(20): n is a, c, g, or t
gccaacagccccagcaagnnkaaccagagagtgaacgcc

SEQ ID NO: 437 - DNA, 41 bp, Artificial Sequence
  SYNTHETIC
  misc_feature (20)..(21): n is a, c, g, or t
caacagccccagcaagttcnnkcagagagtgaacgcctacc

SEQ ID NO: 438 - DNA, 41 bp, Artificial Sequence
  SYNTHETIC
  misc_feature (20)..(21): n is a, c, g, or t
cagccccagcaagttcaacnnkagagtgaacgcctacctga

SEQ ID NO: 439 - DNA, 41 bp, Artificial Sequence
  SYNTHETIC
  misc_feature (20)..(21): n is a, c, g, or t
ccccagcaagttcaaccagnnkgtgaacgcctacctgaaag

SEQ ID NO: 440 - DNA, 45 bp, Artificial Sequence
  SYNTHETIC
  misc_feature (22)..(23): n is a, c, g, or t
cccagcaagttcaaccagagannkaacgcctacctgaaagagcac

SEQ ID NO: 441 - DNA, 43 bp, Artificial Sequence
  SYNTHETIC
  misc_feature (21)..(22): n is a, c, g, or t
gcaagttcaaccagagagtgnnkgcctacctgaaagagcaccc

SEQ ID NO: 442 - DNA, 45 bp, Artificial Sequence
  SYNTHETIC
  misc_feature (22)..(23): n is a, c, g, or t
aagttcaaccagagagtgaacnnktacctgaaagagcaccccgag

SEQ ID NO: 443 - DNA, 39 bp, Artificial Sequence
  SYNTHETIC
  misc_feature (19)..(20): n is a, c, g, or t
aaccagagagtgaacgccnnkctgaaagagcaccccgag

SEQ ID NO: 444 - DNA, 41 bp, Artificial Sequence
  SYNTHETIC
  misc_feature (20)..(21): n is a, c, g, or t
ccagagagtgaacgcctacnnkaaagagcaccccgagacac

SEQ ID NO: 445 - DNA, 37 bp, Artificial Sequence
  SYNTHETIC
  misc_feature (18)..(19): n is a, c, g, or t
gagtgaacgcctacctgnnkgagcaccccgagacacc

SEQ ID NO: 446 - DNA, 40 bp, Artificial Sequence
  SYNTHETIC
  misc_feature (24)..(25): n is a, c, g, or t
agagagtgaacgcctacctgaaannkcaccccgagacacc

SEQ ID NO: 447 - DNA, 41 bp, Artificial Sequence
  SYNTHETIC
  misc_feature (20)..(21): n is a, c, g, or t
gaacgcctacctgaaagagnnkcccgagacacccatcattg

SEQ ID NO: 448 - DNA, 41 bp, Artificial Sequence
  SYNTHETIC
  misc_feature (20)..(21): n is a, c, g, or t
cgcctacctgaaagagcacnnkgagacacccatcattggca

SEQ ID NO: 449 - DNA, 41 bp, Artificial Sequence
  SYNTHETIC
  misc_feature (20)..(21): n is a, c, g, or t
ctacctgaaagagcaccccnnkacacccatcattggcatcg

SEQ ID NO: 450 - DNA, 39 bp, Artificial Sequence
  SYNTHETIC
  misc_feature (19)..(20): n is a, c, g, or t
ctgaaagagcaccccgagnnkcccatcattggcatcgac

SEQ ID NO: 451 - DNA, 43 bp, Artificial Sequence
  SYNTHETIC
  misc_feature (21)..(22): n is a, c, g, or t
tgaaagagcaccccgagacannkatcattggcatcgacagagg

SEQ ID NO: 452 - DNA, 37 bp, Artificial Sequence
  SYNTHETIC
  misc_feature (18)..(19): n is a, c, g, or t
agcaccccgagacacccnnkattggcatcgacagagg

SEQ ID NO: 453 - DNA, 35 bp, Artificial Sequence
  SYNTHETIC
  misc_feature (17)..(18): n is a, c, g, or t
ccccgagacacccatcnnkggcatcgacagaggcg

SEQ ID NO: 454 - DNA, 40 bp, Artificial Sequence
  SYNTHETIC
  misc_feature (25)..(26): n is a, c, g, or t
gagcaccccgagacacccatcattnnkatcgacagaggcg

SEQ ID NO: 455 - DNA, 39 bp, Artificial Sequence
  SYNTHETIC
  misc_feature (19)..(20): n is a, c, g, or t
gagacacccatcattggcnnkgacagaggcgagcggaac

SEQ ID NO: 456 - DNA, 39 bp, Artificial Sequence
  SYNTHETIC
  misc_feature (19)..(20): n is a, c, g, or t
acacccatcattggcatcnnkagaggcgagcggaacctg

SEQ ID NO: 457 - DNA, 39 bp, Artificial Sequence
  SYNTHETIC
  misc_feature (19)..(20): n is a, c, g, or t
cccatcattggcatcgacnnkggcgagcggaacctgatc

SEQ ID NO: 458 - DNA, 45 bp, Artificial Sequence
  SYNTHETIC
  misc_feature (22)..(23): n is a, c, g, or t
cccatcattggcatcgacagannkgagcggaacctgatctacatc

SEQ ID NO: 459 - DNA, 43 bp, Artificial Sequence
  SYNTHETIC
  misc_feature (21)..(22): n is a, c, g, or t
tcattggcatcgacagaggcnnkcggaacctgatctacatcac

SEQ ID NO: 460 - DNA, 41 bp, Artificial Sequence
  SYNTHETIC
  misc_feature (20)..(21): n is a, c, g, or t
tggcatcgacagaggcgagnnkaacctgatctacatcaccg

SEQ ID NO: 461 - DNA, 39 bp, Artificial Sequence
  SYNTHETIC
  misc_feature (19)..(20): n is a, c, g, or t
atcgacagaggcgagcggnnkctgatctacatcaccgtg

SEQ ID NO: 462 - protein, 1307 aa, Artificial Sequence
  SYNTHETIC
MTQFEGFTNLYQVSKTLRFELIPQGKTLKHIQEQGFIEEDKARNDHYKELKPIIDRIYKTYADQCLQLVQLDWENLSAAIDSYRKEKTEETRNALIEEQATYRNAIHDYFIGRTDNLTDAINKRHAEIYKGLFKAELFNGKVLKQLGTVTTTEHENALLRSFDKFTTYFSGFYENRKNVFSAEDISTAIPHRIVQDNFPKFKENCHIFTRLITAVPSLREHFENVKKAIGIFVSTSIEEVFSFPFYNQLLTQTQIDLYNQLLGGISREAGTEKIKGLNEVLNLAIQKNDETAHIIASLPHRFIPLFKQILSDRNTLSFILEEFKSDEEVIQSFCKYKTLLRNENVLETAEALFNELNSIDLTHIFISHKKLETISSALCDHWDTLRNALYERRISELTGKITKSAKEKVQRSLKHEDINLQEIISAAGKELSEAFKQKTSEILSHAHAALDQPLPTTLKKQEEKEILKSQLDSLLGLYHLLDWFAVDESNEVDPEFSARLTGIKLEMEPSLSFYNKARNYATKKPYSVEKFKLNFQMPTLASGWDVNKEKNNGAILFVKNGLYYLGIMPKQKGRYKALSFEPTEKTSEGFDKMYYDYFPDAAKMIPKCSTQLKAVTAHFQTHTTPILLSNNFIEPLEITKEIYDLNNPEKEPKKFQTAYAKKTGDQKGYREALCKWIDFTRDFLSKYTKTTSIDLSSLRPSSQYKDLGEYYAELNPLLYHISFQRIAEKEIMDAVETGKLYLFQIYNKDFAKGHHGKPNLHTLYWTGLFSPENLAKTSIKLNGQAELFYRPKSRMKRMAHRLGEKMLNKKLKDQKTPIPDTLYQELYDYVNHRLSHDLSDEARALLPNVITKEVSHEIIKDRRFTSDKFFFHVPITLNYQAANSPSKFNQRVNAYLKEHPETPIIGIDRGERNLIYITVIDSTGKILEQRSLNTIQQFDYQKKLDNREKERVAARQAWSVVGTIKDLKQGYLSQVIHEIVDLMIHYQAVVVLENLNFGFKSKRTGIAEKAVYQQFEKMLIDKLNCLVLKDYPAEKVGGVLNPYQLTDQFTSFAKMGTQSGFLFYVPAPYTSKIDPLTGFVDPFVWKTIKNHESRKHFLEGFDFLHYDVKTGDFILHFKMNRNLSFQRGLPGFMPAWDIVFEKNETQFDAKGTPFIAGKRIVPVIENHRFTGRYRDLYPANELIALLEEKGIVFRDGSNILPKLLENDDSHAIDTMVALIRSVLQMRNSNAATGEDYINSPVRDLNGVCFDSRFQNPEWPMDADANGAYHIALKGQLLLNHLKESKDLKLQNGISNQDWLAYIQELRN

SEQ ID NO: 463 - DNA, 3921 bp, Artificial Sequence
  SYNTHETIC
atgacccagtttgaaggtttcaccaatctgtatcaggttagcaaaaccctgcgttttgaactgattccgcagggtaaaaccctgaaacatattcaagaacagggcttcatcgaagaggataaagcacgtaacgatcactacaaagaactgaaaccgattatcgaccgcatctataaaacctatgcagatcagtgtctgcagctggttcagctggattgggaaaatctgagcgcagcaattgatagttatcgcaaagaaaaaaccgaagaaacccgtaatgcactgattgaagaacaggcaacctatcgtaatgccatccatgattatttcattggtcgtaccgataatctgaccgatgcaattaacaaacgtcacgccgaaatctataaaggcctgtttaaagccgaactgtttaatggcaaagttctgaaacagctgggcaccgttaccaccaccgaacatgaaaatgcactgctgcgtagctttgataaattcaccacctatttcagcggcttttatgagaatcgcaaaaacgtgtttagcgcagaagatattagcaccgcaattccgcatcgtattgtgcaggataatttcccgaaattcaaagagaactgccacatttttacccgtctgattaccgcagttccgagcctgcgtgaacattttgaaaacgttaaaaaagccatcggcatctttgttagcaccagcattgaagaagtttttagcttcccgttttacaatcagctgctgacccagacccagattgatctgtataaccaactgctgggtggtattagccgtgaagcaggcaccgaaaaaatcaaaggtctgaatgaagtgctgaatctggccattcagaaaaatgatgaaaccgcacatattattgcaagcctgccgcatcgttttattccgctgttcaaacaaattctgagcgatcgtaataccctgagctttattctggaagaattcaaatccgatgaagaggtgattcagagcttttgcaaatacaaaacgctgctgcgcaatgaaaatgttctggaaactgccgaagcactgtttaacgaactgaatagcattgatctgacccacatctttatcagccacaaaaaactggaaaccatttcaagcgcactgtgtgatcattgggataccctgcgtaatgccctgtatgaacgtcgtattagcgaactgaccggtaaaattaccaaaagcgcgaaagaaaaagttcagcgcagtctgaaacatgaggatattaatctgcaagagattattagcgcagccggtaaagaactgtcagaagcatttaaacagaaaaccagcgaaattctgtcacatgcacatgcagcactggatcagccgctgccgaccaccctgaaaaaacaagaagaaaaagaaatcctgaaaagccagctggatagcctgctgggtctgtatcatctgctggactggtttgcagttgatgaaagcaatgaagttgatccggaatttagcgcacgtctgaccggcattaaactggaaatggaaccgagcctgagcttttataacaaagcccgtaattatgccaccaaaaaaccgtatagcgtcgaaaaattcaaactgaactttcagatgccgaccctggcaagcggttgggatgttaataaagaaaaaaacaacggtgccatcctgttcgtgaaaaatggcctgtattatctgggtattatgccgaaacagaaaggtcgttataaagcgctgagctttgaaccgacggaaaaaaccagtgaaggttttgataaaatgtactacgactattttccggatgcagccaaaatgattccgaaatgtagcacccagctgaaagcagttaccgcacattttcagacccataccaccccgattctgctgagcaataactttattgaaccgctggaaatcaccaaagagatctacgatctgaataacccggaaaaagagccgaaaaaattccagaccgcatatgcaaaaaaaaccggtgatcagaaaggttatcgtgaagcgctgtgtaaatggattgatttcacccgtgattttctgagcaaatacaccaaaaccaccagtatcgatctgagcagcctgcgtccgagcagccagtataaagatctgggcgaatattatgcagaactgaatccgctgctgtatcatattagctttcagcgtattgccgagaaagaaatcatggacgcagttgaaaccggtaaactgtacctgttccagatctacaataaagattttgccaaaggccatcatggcaaaccgaatctgcataccctgtattggaccggtctgtttagccctgaaaatctggcaaaaacctcgattaaactgaatggtcaggcggaactgttttatcgtccgaaaagccgtatgaaacgtatggcacatcgtctgggtgaaaaaatgctgaacaaaaaactgaaagaccagaaaaccccgatcccggatacactgtatcaagaactgtatgattatgtgaaccatcgtctgagccatgatctgagtgatgaagcacgtgccctgctgccgaatgttattaccaaagaagttagccacgagatcattaaagatcgtcgttttaccagcgacaaattcttttttcatgtgccgattaccctgaattatcaggcagcaaatagcccgagcaaatttaaccagcgtgttaatgcatatctgaaagaacatccagaaacgccgattattggtattgatcgtggtgaacgtaacctgatttatatcaccgttattgatagcaccggcaaaatcctggaacagcgtagcctgaataccattcagcagtttgattaccagaaaaaactggataatcgcgagaaagaacgtgttgcagcacgtcaggcatggtcagttgttggtacaattaaagacctgaaacagggttatctgagccaggttattcatgaaattgtggatctgatgattcactatcaggccgttgttgtgctggaaaacctgaattttggctttaaaagcaaacgtaccggcattgcagaaaaagcagtttatcagcagttcgagaaaatgctgattgacaaactgaattgcctggtgctgaaagattatccggctgaaaaagttggtggtgttctgaatccgtatcagctgaccgatcagtttaccagctttgcaaaaatgggcacccagagcggatttctgttttatgttccggcaccgtatacgagcaaaattgatccgctgaccggttttgttgatccgtttgtttggaaaaccatcaaaaaccatgaaagccgcaaacattttctggaaggtttcgattttctgcattacgacgttaaaacgggtgatttcatcctgcactttaaaatgaatcgcaatctgagttttcagcgtggcctgcctggttttatgcctgcatgggatattgtgtttgagaaaaacgaaacacagttcgatgcaaaaggcaccccgtttattgcaggtaaacgtattgttccggtgattgaaaatcatcgtttcaccggtcgttatcgcgatctgtatccggcaaatgaactgatcgcactgctggaagagaaaggtattgtttttcgtgatggctcaaacattctgccgaaactgctggaaaatgatgatagccatgcaattgataccatggttgcactgattcgtagcgttctgcagatgcgtaatagcaatgcagcaaccggtgaagattacattaatagtccggttcgtgatctgaatggtgtttgttttgatagccgttttcagaatccggaatggccgatggatgcagatgcaaatggtgcatatcatattgcactgaaaggacagctgctgctgaaccacctgaaagaaagcaaagatctgaaactgcaaaacggcattagcaatcaggattggctggcatatatccaagaactgcgtaac

SEQ ID NO: 464 - DNA, 3921 bp, Artificial Sequence; identical to SEQ ID NO: 463
  SYNTHETIC

SEQ ID NO: 465 - protein, 1307 aa, Artificial Sequence
  SYNTHETIC
MTQFEGFTNLYQVSKTLRFELIPQGKTLKHIQEQGFIEEDKARNDHYKELKPIIDRIYKTYADQCLQLVQLDWENLSAAIDSYRKEKTEETRNALIEEQATYRNAIHDYFIGRTDNLTDAINKRHAEIYKGLFKAELFNGKVLKQLGTVTTTEHENALLRSFDKFTTYFSGFYENRKNVFSAEDISTAIPHRIVQDNFPKFKENCHIFTRLITAVPSLREHFENVKKAIGIFVSTSIEEVFSFPFYNQLLTQTQIDLYNQLLGGISREAGTEKIKGLNEVLNLAIQKNDETAHIIASLPHRFIPLFKQILSDRNTLSFILEEFKSDEEVIQSFCKYKTLLRNENVLETAEALFNELNSIDLTHIFISHKKLETISSALCDHWDTLRNALYERRISELTGKITKSAKEKVQRSLKHEDINLQEIISAAGKELSEAFKQKTSEILSHAHAALDQPLPTTLKKQEEKEILKSQLDSLLGLYHLLDWFAVDESNEVDPEFSARLTGIKLEMEPSLSFYNKARNYATKKPYSVEKFKLNFQRPTLASGWDVNKEKNNGAILFVKNGLYYLGIMPKQKGRYKALSFEPTEKTSEGFDKMYYDYFPDAAKMIPKCSTQLKAVTAHFQTHTTPILLSNNFIEPLEITKEIYDLNNPEKEPKKFQTAYAKKTGDQKGYREALCKWIDFTRDFLSKYTKTTSIDLSSLRPSSQYKDLGEYYAELNPLLYHISFQRIAEKEIMDAVETGKLYLFQIYNKDFAKGHHGKPNLHTLYWTGLFSPENLAKTSIKLNGQAELFYRPKSRMKRMAHRLGEKMLNKKLKDQKTPIPDTLYQELYDYVNHRLSHDLSDEARALLPNVITKEVSHEIIKDRRFTSDKFLFHVPITLNYQAANSPSKFNQRVNAYLKEHPETPIIGIDRGERNLIYITVIDSTGKILEQRSLNTIQQFDYQKKLDNREKERVAARQAWSVVGTIKDLKQGYLSQVIHEIVDLMIHYQAVVVLENLNFGFKSKRTGIAEKAVYQQFEKMLIDKLNCLVLKDYPAEKVGGVLNPYQLTDQFTSFAKMGTQSGFLFYVPAPYTSKIDPLTGFVDPFVWKTIKNHESRKHFLEGFDFLHYDVKTGDFILHFKMNRNLSFQRGLPGFMPAWDIVFEKNETQFDAKGTPFIAGKRIVPVIENHRFTGRYRDLYPANELIALLEEKGIVFRDGSNILPKLLENDDSHAIDTMVALIRSVLQMRNSNAATGEDYINSPVRDLNGVCFDSRFQNPEWPMDADANGAYHIALKGQLLLNHLKESKDLKLQNGISNQDWLAYIQELRN

SEQ ID NO: 466 - DNA, 3921 bp, Artificial Sequence
  SYNTHETIC
atgacccagtttgaaggtttcaccaatctgtatcaggttagcaaaaccctgcgttttgaactgattccgcagggtaaaaccctgaaacatattcaagaacagggcttcatcgaagaggataaagcacgtaacgatcactacaaagaactgaaaccgattatcgaccgcatctataaaacctatgcagatcagtgtctgcagctggttcagctggattgggaaaatctgagcgcagcaattgatagttatcgcaaagaaaaaaccgaagaaacccgtaatgcactgattgaagaacaggcaacctatcgtaatgccatccatgattatttcattggtcgtaccgataatctgaccgatgcaattaacaaacgtcacgccgaaatctataaaggcctgtttaaagccgaactgtttaatggcaaagttctgaaacagctgggcaccgttaccaccaccgaacatgaaaatgcactgctgcgtagctttgataaattcaccacctatttcagcggcttttatgagaatcgcaaaaacgtgtttagcgcagaagatattagcaccgcaattccgcatcgtattgtgcaggataatttcccgaaattcaaagagaactgccacatttttacccgtctgattaccgcagttccgagcctgcgtgaacattttgaaaacgttaaaaaagccatcggcatctttgttagcaccagcattgaagaagtttttagcttcccgttttacaatcagctgctgacccagacccagattgatctgtataaccaactgctgggtggtattagccgtgaagcaggcaccgaaaaaatcaaaggtctgaatgaagtgctgaatctggccattcagaaaaatgatgaaaccgcacatattattgcaagcctgccgcatcgttttattccgctgttcaaacaaattctgagcgatcgtaataccctgagctttattctggaagaattcaaatccgatgaagaggtgattcagagcttttgcaaatacaaaacgctgctgcgcaatgaaaatgttctggaaactgccgaagcactgtttaacgaactgaatagcattgatctgacccacatctttatcagccacaaaaaactggaaaccatttcaagcgcactgtgtgatcattgggataccctgcgtaatgccctgtatgaacgtcgtattagcgaactgaccggtaaaattaccaaaagcgcgaaagaaaaagttcagcgcagtctgaaacatgaggatattaatctgcaagagattattagcgcagccggtaaagaactgtcagaagcatttaaacagaaaaccagcgaaattctgtcacatgcacatgcagcactggatcagccgctgccgaccaccctgaaaaaacaagaagaaaaagaaatcctgaaaagccagctggatagcctgctgggtctgtatcatctgctggactggtttgcagttgatgaaagcaatgaagttgatccggaatttagcgcacgtctgaccggcattaaactggaaatggaaccgagcctgagcttttataacaaagcccgtaattatgccaccaaaaaaccgtatagcgtcgaaaaattcaaactgaactttcagcgtccgaccctggcaagcggttgggatgttaataaagaaaaaaacaacggtgccatcctgttcgtgaaaaatggcctgtattatctgggtattatgccgaaacagaaaggtcgttataaagcgctgagctttgaaccgacggaaaaaaccagtgaaggttttgataaaatgtactacgactattttccggatgcagccaaaatgattccgaaatgtagcacccagctgaaagcagttaccgcacattttcagacccataccaccccgattctgctgagcaataactttattgaaccgctggaaatcaccaaagagatctacgatctgaataacccggaaaaagagccgaaaaaattccagaccgcatatgcaaaaaaaaccggtgatcagaaaggttatcgtgaagcgctgtgtaaatggattgatttcacccgtgattttctgagcaaatacaccaaaaccaccagtatcgatctgagcagcctgcgtccgagcagccagtataaagatctgggcgaatattatgcagaactgaatccgctgctgtatcatattagctttcagcgtattgccgagaaagaaatcatggacgcagttgaaaccggtaaactgtacctgttccagatctacaataaagattttgccaaaggccatcatggcaaaccgaatctgcataccctgtattggaccggtctgtttagccctgaaaatctggcaaaaacctcgattaaactgaatggtcaggcggaactgttttatcgtccgaaaagccgtatgaaacgtatggcacatcgtctgggtgaaaaaatgctgaacaaaaaactgaaagaccagaaaaccccgatcccggatacactgtatcaagaactgtatgattatgtgaaccatcgtctgagccatgatctgagtgatgaagcacgtgccctgctgccgaatgttattaccaaagaagttagccacgagatcattaaagatcgtcgttttaccagcgacaaattcctgtttcatgtgccgattaccctgaattatcaggcagcaaatagcccgagcaaatttaaccagcgtgttaatgcatatctgaaagaacatccagaaacgccgattattggtattgatcgtggtgaacgtaacctgatttatatcaccgttattgatagcaccggcaaaatcctggaacagcgtagcctgaataccattcagcagtttgattaccagaaaaaactggataatcgcgagaaagaacgtgttgcagcacgtcaggcatggtcagttgttggtacaattaaagacctgaaacagggttatctgagccaggttattcatgaaattgtggatctgatgattcactatcaggccgttgttgtgctggaaaacctgaattttggctttaaaagcaaacgtaccggcattgcagaaaaagcagtttatcagcagttcgagaaaatgctgattgacaaactgaattgcctggtgctgaaagattatccggctgaaaaagttggtggtgttctgaatccgtatcagctgaccgatcagtttaccagctttgcaaaaatgggcacccagagcggatttctgttttatgttccggcaccgtatacgagcaaaattgatccgctgaccggttttgttgatccgtttgtttggaaaaccatcaaaaaccatgaaagccgcaaacattttctggaaggtttcgattttctgcattacgacgttaaaacgggtgatttcatcctgcactttaaaatgaatcgcaatctgagttttcagcgtggcctgcctggttttatgcctgcatgggatattgtgtttgagaaaaacgaaacacagttcgatgcaaaaggcaccccgtttattgcaggtaaacgtattgttccggtgattgaaaatcatcgtttcaccggtcgttatcgcgatctgtatccggcaaatgaactgatcgcactgctggaagagaaaggtattgtttttcgtgatggctcaaacattctgccgaaactgctggaaaatgatgatagccatgcaattgataccatggttgcactgattcgtagcgttctgcagatgcgtaatagcaatgcagcaaccggtgaagattacattaatagtccggttcgtgatctgaatggtgtttgttttgatagccgttttcagaatccggaatggccgatggatgcagatgcaaatggtgcatatcatattgcactgaaaggacagctgctgctgaaccacctgaaagaaagcaaagatctgaaactgcaaaacggcattagcaatcaggattggctggcatatatccaagaactgcgtaac

SEQ ID NO: 467 - DNA, 3921 bp, Artificial Sequence; identical to SEQ ID NO: 466
  SYNTHETIC

SEQ ID NO: 468 - DNA, 3921 bp, Artificial Sequence
  SYNTHETIC
atgacccagtttgaaggtttcaccaatctgtatcaggttagcaaaaccctgcgttttgaactgattccgcagggtaaaaccctgaaacatattcaagaacagggcttcatcgaagaggataaagcacgtaacgatcactacaaagaactgaaaccgattatcgaccgcatctataaaacctatgcagatcagtgtctgcagctggttcagctggattgggaaaatctgagcgcagcaattgatagttatcgcaaagaaaaaaccgaagaaacccgtaatgcactgattgaagaacaggcaacctatcgtaatgccatccatgattatttcattggtcgtaccgataatctgaccgatgcaattaacaaacgtcacgccgaaatctataaaggcctgtttaaagccgaactgtttaatggcaaagttctgaaacagctgggcaccgttaccaccaccgaacatgaaaatgcactgctgcgtagctttgataaattcaccacctatttcagcggcttttatgagaatcgcaaaaacgtgtttagcgcagaagatattagcaccgcaattccgcatcgtattgtgcaggataatttcccgaaattcaaagagaactgccacatttttacccgtctgattaccgcagttccgagcctgcgtgaacattttgaaaacgttaaaaaagccatcggcatctttgttagcaccagcattgaagaagtttttagcttcccgttttacaatcagctgctgacccagacccagattgatctgtataaccaactgctgggtggtattagccgtgaagcaggcaccgaaaaaatcaaaggtctgaatgaagtgctgaatctggccattcagaaaaatgatgaaaccgcacatattattgcaagcctgccgcatcgttttattccgctgttcaaacaaattctgagcgatcgtaataccctgagctttattctggaagaattcaaatccgatgaagaggtgattcagagcttttgcaaatacaaaacgctgctgcgcaatgaaaatgttctggaaactgccgaagcactgtttaacgaactgaatagcattgatctgacccacatctttatcagccacaaaaaactggaaaccatttcaagcgcactgtgtgatcattgggataccctgcgtaatgccctgtatgaacgtcgtattagcgaactgaccggtaaaattaccaaaagcgcgaaagaaaaagttcagcgcagtctgaaacatgaggatattaatctgcaagagattattagcgcagccggtaaagaactgtcagaagcatttaaacagaaaaccagcgaaattctgtcacatgcacatgcagcactggatcagccgctgccgaccaccctgaaaaaacaagaagaaaaagaaatcctgaaaagccagctggatagcctgctgggtctgtatcatctgctggactggtttgcagttgatgaaagcaatgaagttgatccggaatttagcgcacgtctgaccggcattaaactggaaatggaaccgagcctgagcttttataacaaagcccgtaattatgccaccaaaaaaccgtatagcgtcgaaaaattcaaactgaactttcagcgtccgaccctggcaagcggttgggatgttaataaagaaaaaaacaacggtgccatcctgttcgtgaaaaatggcctgtattatctgggtattatgccgaaacagaaaggtcgttataaagcgctgagctttgaaccgacggaaaaaaccagtgaaggttttgataaaatgtactacgactattttccggatgcagccaaaatgattccgaaatgtagcacccagctgaaagcagttaccgcacattttcagacccataccaccccgattctgctgagcaataactttattgaaccgctggaaatcaccaaagagatctacgatctgaataacccggaaaaagagccgaaaaaattccagaccgcatatgcaaaaaaaaccggtgatcagaaaggttatcgtgaagcgctgtgtaaatggattgatttcacccgtgattttctgagcaaatacaccaaaaccaccagtatcgatctgagcagcctgcgtccgagcagccagtataaagatctgggcgaatattatgcagaactgaatccgctgctgtatcatattagctttcagcgtattgccgagaaagaaatcatggacgcagttgaaaccggtaaactgtacctgttccagatctacaataaagattttgccaaaggccatcatggcaaaccgaatctgcataccctgtattggaccggtctgtttagccctgaaaatctggcaaaaacctcgattaaactgaatggtcaggcggaactgttttatcgtccgaaaagccgtatgaaacgtatggcacatcgtctgggtgaaaaaatgctgaacaaaaaactgaaagaccagaaaaccccgatcccggatacactgtatcaagaactgtatgattatgtgaaccatcgtctgagccatgatctgagtgatgaagcacgtgccctgctgccgaatgttattaccaaagaagttagccacgagatcattaaagatcgtcgttttaccagcgacaaattcttttttcatgtgccgattaccctgaattatcaggcagcaaatagcccgagcaaatttaaccagcgtgttaatgcatatctgaaagaacatccagaaacgccgattattggtattgatcgtggtgaacgtaacctgatttatatcaccgttattgatagcaccggcaaaatcctggaacagcgtagcctgaataccattcagcagtttgattaccagaaaaaactggataatcgcgagaaagaacgtgttgcagcacgtcaggcatggtcagttgttggtacaattaaagacctgaaacagggttatctgagccaggttattcatgaaattgtggatctgatgattcactatcaggccgttgttgtgctggaaaacctgaattttggctttaaaagcaaacgtaccggcattgcagaaaaagcagtttatcagcagttcgagaaaatgctgattgacaaactgaattgcctggtgctgaaagattatccggctgaaaaagttggtggtgttctgaatccgtatcagctgaccgatcagtttaccagctttgcaaaaatgggcacccagagcggatttctgttttatgttccggcaccgtatacgagcaaaattgatccgctgaccggttttgttgatccgtttgtttggaaaaccatcaaaaaccatgaaagccgcaaacattttctggaaggtttcgattttctgcattacgacgttaaaacgggtgatttcatcctgcactttaaaatgaatcgcaatctgagttttcagcgtggcctgcctggttttatgcctgcatgggatattgtgtttgagaaaaacgaaacacagttcgatgcaaaaggcaccccgtttattgcaggtaaacgtattgttccggtgattgaaaatcatcgtttcaccggtcgttatcgcgatctgtatccggcaaatgaactgatcgcactgctggaagagaaaggtattgtttttcgtgatggctcaaacattctgccgaaactgctggaaaatgatgatagccatgcaattgataccatggttgcactgattcgtagcgttctgcagatgcgtaatagcaatgcagcaaccggtgaagattacattaatagtccggttcgtgatctgaatggtgtttgttttgatagccgttttcagaatccggaatggccgatggatgcagatgcaaatggtgcatatcatattgcactgaaaggacagctgctgctgaaccacctgaaagaaagcaaagatctgaaactgcaaaacggcattagcaatcaggattggctggcatatatccaagaactgcgtaac

SEQ ID NO: 469 - DNA, 3921 bp, Artificial Sequence
  SYNTHETIC
atgacccagtttgaaggtttcaccaatctgtatcaggttagcaaaaccctgcgttttgaactgattccgcagggtaaaaccctgaaacatattcaagaacagggcttcatcgaagaggataaagcacgtaacgatcactacaaagaactgaaaccgattatcgaccgcatctataaaacctatgcagatcagtgtctgcagctggttcagctggattgggaaaatctgagcgcagcaattgatagttatcgcaaagaaaaaaccgaagaaacccgtaatgcactgattgaagaacaggcaacctatcgtaatgccatccatgattatttcattggtcgtaccgataatctgaccgatgcaattaacaaacgtcacgccgaaatctataaaggcctgtttaaagccgaactgtttaatggcaaagttctgaaacagctgggcaccgttaccaccaccgaacatgaaaatgcactgctgcgtagctttgataaattcaccacctatttcagcggcttttatgagaatcgcaaaaacgtgtttagcgcagaagatattagcaccgcaattccgcatcgtattgtgcaggataatttcccgaaattcaaagagaactgccacatttttacccgtctgattaccgcagttccgagcctgcgtgaacattttgaaaacgttaaaaaagccatcggcatctttgttagcaccagcattgaagaagtttttagcttcccgttttacaatcagctgctgacccagacccagattgatctgtataaccaactgctgggtggtattagccgtgaagcaggcaccgaaaaaatcaaaggtctgaatgaagtgctgaatctggccattcagaaaaatgatgaaaccgcacatattattgcaagcctgccgcatcgttttattccgctgttcaaacaaattctgagcgatcgtaataccctgagctttattctggaagaattcaaatccgatgaagaggtgattcagagcttttgcaaatacaaaacgctgctgcgcaatgaaaatgttctggaaactgccgaagcactgtttaacgaactgaatagcattgatctgacccacatctttatcagccacaaaaaactggaaaccatttcaagcgcactgtgtgatcattgggataccctgcgtaatgccctgtatgaacgtcgtattagcgaactgaccggtaaaattaccaaaagcgcgaaagaaaaagttcagcgcagtctgaaacatgaggatattaatctgcaagagattattagcgcagccggtaaagaactgtcagaagcatttaaacagaaaaccagcgaaattctgtcacatgcacatgcagcactggatcagccgctgccgaccaccctgaaaaaacaagaagaaaaagaaatcctgaaaagccagctggatagcctgctgggtctgtatcatctgctggactggtttgcagttgatgaaagcaatgaagttgatccggaatttagcgcacgtctgaccggcattaaactggaaatggaaccgagcctgagcttttataacaaagcccgtaattatgccaccaaaaaaccgtatagcgtcgaaaaattcaaactgaactttcagatgccgaccctggcaagcggttgggatgttaataaagaaaaaaacaacggtgccatcctgttcgtgaaaaatggcctgtattatctgggtattatgccgaaacagaaaggtcgttataaagcgctgagctttgaaccgacggaaaaaaccagtgaaggttttgataaaatgtactacgactattttccggatgcagccaaaatgattccgaaatgtagcacccagctgaaagcagttaccgcacattttcagacccataccaccccgattctgctgagcaataactttattgaaccgctggaaatcaccaaagagatctacgatctgaataacccggaaaaagagccgaaaaaattccagaccgcatatgcaaaaaaaaccggtgatcagaaaggttatcgtgaagcgctgtgtaaatggattgatttcacccgtgattttctgagcaaatacaccaaaaccaccagtatcgatctgagcagcctgcgtccgagcagccagtataaagatctgggcgaatattatgcagaactgaatccgctgctgtatcatattagctttcagcgtattgccgagaaagaaatcatggacgcagttgaaaccggtaaactgtacctgttccagatctacaataaagattttgccaaaggccatcatggcaaaccgaatctgcataccctgtattggaccggtctgtttagccctgaaaatctggcaaaaacctcgattaaactgaatggtcaggcggaactgttttatcgtccgaaaagccgtatgaaacgtatggcacatcgtctgggtgaaaaaatgctgaacaaaaaactgaaagaccagaaaaccccgatcccggatacactgtatcaagaactgtatgattatgtgaaccatcgtctgagccatgatctgagtgatgaagcacgtgccctgctgccgaatgttattaccaaagaagttagccacgagatcattaaagatcgtcgttttaccagcgacaaattcctgtttcatgtgccgattaccctgaattatcaggcagcaaatagcccgagcaaatttaaccagcgtgttaatgcatatctgaaagaacatccagaaacgccgattattggtattgatcgtggtgaacgtaacctgatttatatcaccgttattgatagcaccggcaaaatcctggaacagcgtagcctgaataccattcagcagtttgattaccagaaaaaactggataatcgcgagaaagaacgtgttgcagcacgtcaggcatggtcagttgttggtacaattaaagacctgaaacagggttatctgagccaggttattcatgaaattgtggatctgatgattcactatcaggccgttgttgtgctggaaaacctgaattttggctttaaaagcaaacgtaccggcattgcagaaaaagcagtttatcagcagttcgagaaaatgctgattgacaaactgaattgcctggtgctgaaagattatccggctgaaaaagttggtggtgttctgaatccgtatcagctgaccgatcagtttaccagctttgcaaaaatgggcacccagagcggatttctgttttatgttccggcaccgtatacgagcaaaattgatccgctgaccggttttgttgatccgtttgtttggaaaaccatcaaaaaccatgaaagccgcaaacattttctggaaggtttcgattttctgcattacgacgttaaaacgggtgatttcatcctgcactttaaaatgaatcgcaatctgagttttcagcgtggcctgcctggttttatgcctgcatgggatattgtgtttgagaaaaacgaaacacagttcgatgcaaaaggcaccccgtttattgcaggtaaacgtattgttccggtgattgaaaatcatcgtttcaccggtcgttatcgcgatctgtatccggcaaatgaactgatcgcactgctggaagagaaaggtattgtttttcgtgatggctcaaacattctgccgaaactgctggaaaatgatgatagccatgcaattgataccatggttgcactgattcgtagcgttctgcagatgcgtaatagcaatgcagcaaccggtgaagattacattaatagtccggttcgtgatctgaatggtgtttgttttgatagccgttttcagaatccggaatggccgatggatgcagatgcaaatggtgcatatcatattgcactgaaaggacagctgctgctgaaccacctgaaagaaagcaaagatctgaaactgcaaaacggcattagcaatcaggattggctggcatatatccaagaactgcgtaac

SEQ ID NO: 470 - DNA, 3921 bp, Artificial Sequence; identical to SEQ ID NO: 468
  SYNTHETIC

SEQ ID NO: 471 - DNA, 3921 bp, Artificial Sequence; identical to SEQ ID NO: 469
  SYNTHETIC

SEQ ID NO: 472 - protein, 1307 aa, Artificial Sequence
  SYNTHETIC
MTQFEGFTNLYQVSKTLRFELIPQGKTLKHIQEQGFIEEDKARNDHYKELKPIIDRIYKTYADQCLQLVQLDWENLSAAIDSYRKEKTEETRNALIEEQATYRNAIHDYFIGRTDNLTDAINKRHAEIYKGLFKAELFNGKVLKQLGTVTTTEHENALLRSFDKFTTYFSGFYENRKNVFSAEDISTAIPHRIVQDNFPKFKENCHIFTRLITAVPSLREHFENVKKAIGIFVSTSIEEVFSFPFYNQLLTQTQIDLYNQLLGGISREAGTEKIKGLNEVLNLAIQKNDETAHIIASLPHRFIPLFKQILSDRNTLSFILEEFKSDEEVIQSFCKYKTLLRNENVLETAEALFNELNSIDLTHIFISHKKLETISSALCDHWDTLRNALYERRISELTGKITKSAKEKVQRSLKHEDINLQEIISAAGKELSEAFKQKTSEILSHAHAALDQPLPTTLKKQEEKEILKSQLDSLLGLYHLLDWFAVDESNEVDPEFSARLTGIKLEMEPSLSFYNKARNYATKKPYSVEKFKLNFQRPTLASGWDVNKEKNNGAILFVKNGLYYLGIMPKQKGRYKALSFEPTEKTSEGFDKMYYDYFPDAAKMIPKCSTQLKAVTAHFQTHTTPILLSNNFIEPLEITKEIYDLNNPEKEPKKFQTAYAKKTGDQKGYREALCKWIDFTRDFLSKYTKTTSIDLSSLRPSSQYKDLGEYYAELNPLLYHISFQRIAEKEIMDAVETGKLYLFQIYNKDFAKGHHGKPNLHTLYWTGLFSPENLAKTSIKLNGQAELFYRPKSRMKRMAHRLGEKMLNKKLKDQKTPIPDTLYQELYDYVNHRLSHDLSDEARALLPNVITKEVSHEIIKDRRFTSDKFFFHVPITLNYQAANSPSKFNQRVNAYLKEHPETPIIGIDRGERNLIYITVIDSTGKILEQRSLNTIQQFDYQKKLDNREKERVAARQAWSVVGTIKDLKQGYLSQVIHEIVDLMIHYQAVVVLENLNFGFKSKRTGIAEKAVYQQFEKMLIDKLNCLVLKDYPAEKVGGVLNPYQLTDQFTSFAKMGTQSGFLFYVPAPYTSKIDPLTGFVDPFVWKTIKNHESRKHFLEGFDFLHYDVKTGDFILHFKMNRNLSFQRGLPGFMPAWDIVFEKNETQFDAKGTPFIAGKRIVPVIENHRFTGRYRDLYPANELIALLEEKGIVFRDGSNILPKLLENDDSHAIDTMVALIRSVLQMRNSNAATGEDYINSPVRDLNGVCFDSRFQNPEWPMDADANGAYHIALKGQLLLNHLKESKDLKLQNGISNQDWLAYIQELRN

SEQ ID NO: 473 - protein, 1307 aa, Artificial Sequence
  SYNTHETIC
MTQFEGFTNLYQVSKTLRFELIPQGKTLKHIQEQGFIEEDKARNDHYKELKPIIDRIYKTYADQCLQLVQLDWENLSAAIDSYRKEKTEETRNALIEEQATYRNAIHDYFIGRTDNLTDAINKRHAEIYKGLFKAELFNGKVLKQLGTVTTTEHENALLRSFDKFTTYFSGFYENRKNVFSAEDISTAIPHRIVQDNFPKFKENCHIFTRLITAVPSLREHFENVKKAIGIFVSTSIEEVFSFPFYNQLLTQTQIDLYNQLLGGISREAGTEKIKGLNEVLNLAIQKNDETAHIIASLPHRFIPLFKQILSDRNTLSFILEEFKSDEEVIQSFCKYKTLLRNENVLETAEALFNELNSIDLTHIFISHKKLETISSALCDHWDTLRNALYERRISELTGKITKSAKEKVQRSLKHEDINLQEIISAAGKELSEAFKQKTSEILSHAHAALDQPLPTTLKKQEEKEILKSQLDSLLGLYHLLDWFAVDESNEVDPEFSARLTGIKLEMEPSLSFYNKARNYATKKPYSVEKFKLNFQMPTLASGWDVNKEKNNGAILFVKNGLYYLGIMPKQKGRYKALSFEPTEKTSEGFDKMYYDYFPDAAKMIPKCSTQLKAVTAHFQTHTTPILLSNNFIEPLEITKEIYDLNNPEKEPKKFQTAYAKKTGDQKGYREALCKWIDFTRDFLSKYTKTTSIDLSSLRPSSQYKDLGEYYAELNPLLYHISFQRIAEKEIMDAVETGKLYLFQIYNKDFAKGHHGKPNLHTLYWTGLFSPENLAKTSIKLNGQAELFYRPKSRMKRMAHRLGEKMLNKKLKDQKTPIPDTLYQELYDYVNHRLSHDLSDEARALLPNVITKEVSHEIIKDRRFTSDKFLFHVPITLNYQAANSPSKFNQRVNAYLKEHPETPIIGIDRGERNLIYITVIDSTGKILEQRSLNTIQQFDYQKKLDNREKERVAARQAWSVVGTIKDLKQGYLSQVIHEIVDLMIHYQAVVVLENLNFGFKSKRTGIAEKAVYQQFEKMLIDKLNCLVLKDYPAEKVGGVLNPYQLTDQFTSFAKMGTQSGFLFYVPAPYTSKIDPLTGFVDPFVWKTIKNHESRKHFLEGFDFLHYDVKTGDFILHFKMNRNLSFQRGLPGFMPAWDIVFEKNETQFDAKGTPFIAGKRIVPVIENHRFTGRYRDLYPANELIALLEEKGIVFRDGSNILPKLLENDDSHAIDTMVALIRSVLQMRNSNAATGEDYINSPVRDLNGVCFDSRFQNPEWPMDADANGAYHIALKGQLLLNHLKESKDLKLQNGISNQDWLAYIQELRN

SEQ ID NO: 474 - DNA, 23 bp, Artificial Sequence
  SYNTHETIC
ccgaaaaaaaaacgtaaagttgg

SEQ ID NO: 475 - protein, 7 aa, Artificial Sequence
  SYNTHETIC
PKKKRKV

SEQ ID NO: 476 - DNA, 66 bp, Artificial Sequence
  SYNTHETIC
agcagtgatgatgaagcaaccgcagatagccagcatgcagcaccgcctaaaaagaaacgtaaagtt

SEQ ID NO: 477 - protein, 22 aa, Artificial Sequence
  SYNTHETIC
SSDDEATADSQHAAPPKKKRKV

SEQ ID NO: 478 - DNA, 27 bp, Artificial Sequence
  SYNTHETIC
ccgcctccgaaacgtccgcgtctggat

SEQ ID NO: 479 - protein, 9 aa, Artificial Sequence
  SYNTHETIC
PPPKRPRLD

SEQ ID NO: 480 - DNA, 48 bp, Artificial Sequence
  SYNTHETIC
aaacgtccggcagcaaccaaaaaagcaggtcaggcaaaaaagaaaaaa

SEQ ID NO: 481 - protein, 16 aa, Artificial Sequence
  SYNTHETIC
KRPAATKKAGQAKKKK

SEQ ID NO: 482 - DNA, 57 bp, Artificial Sequence
  SYNTHETIC
aaacgtaccgcagatggtagcgaatttgaaagcccgaaaaaaaagcgtaaggtggaa

SEQ ID NO: 483 - protein, 19 aa, Artificial Sequence
  SYNTHETIC
KRTADGSEFESPKKKRKVE

SEQ ID NO: 484 - DNA, 42 bp, Artificial Sequence
  SYNTHETIC
ggtaaaccgattccgaatccgctgctgggtctggatagcacc

SEQ ID NO: 485 - protein, 14 aa, Artificial Sequence
  SYNTHETIC
GKPIPNPLLGLDST

SEQ ID NO: 486 - DNA, 18 bp, Artificial Sequence
  SYNTHETIC
caccaccaccaccaccac

SEQ ID NO: 487 - protein, 6 aa, Artificial Sequence
  SYNTHETIC
HHHHHH

SEQ ID NO: 488 - DNA, 4089 bp, Artificial Sequence
  SYNTHETIC
atgacccagtttgaaggtttcaccaatctgtatcaggttagcaaaaccctgcgttttgaactgattccgcagggtaaaaccctgaaacatattcaagaacagggcttcatcgaagaggataaagcacgtaacgatcactacaaagaactgaaaccgattatcgaccgcatctataaaacctatgcagatcagtgtctgcagctggttcagctggattgggaaaatctgagcgcagcaattgatagttatcgcaaagaaaaaaccgaagaaacccgtaatgcactgattgaagaacaggcaacctatcgtaatgccatccatgattatttcattggtcgtaccgataatctgaccgatgcaattaacaaacgtcacgccgaaatctataaaggcctgtttaaagccgaactgtttaatggcaaagttctgaaacagctgggcaccgttaccaccaccgaacatgaaaatgcactgctgcgtagctttgataaattcaccacctatttcagcggcttttatgagaatcgcaaaaacgtgtttagcgcagaagatattagcaccgcaattccgcatcgtattgtgcaggataatttcccgaaattcaaagagaactgccacatttttacccgtctgattaccgcagttccgagcctgcgtgaacattttgaaaacgttaaaaaagccatcggcatctttgttagcaccagcattgaagaagtttttagcttcccgttttacaatcagctgctgacccagacccagattgatctgtataaccaactgctgggtggtattagccgtgaagcaggcaccgaaaaaatcaaaggtctgaatgaagtgctgaatctggccattcagaaaaatgatgaaaccgcacatattattgcaagcctgccgcatcgttttattccgctgttcaaacaaattctgagcgatcgtaataccctgagctttattctggaagaattcaaatccgatgaagaggtgattcagagcttttgcaaatacaaaacgctgctgcgcaatgaaaatgttctggaaactgccgaagcactgtttaacgaactgaatagcattgatctgacccacatctttatcagccacaaaaaactggaaaccatttcaagcgcactgtgtgatcattgggataccctgcgtaatgccctgtatgaacgtcgtattagcgaactgaccggtaaaattaccaaaagcgcgaaagaaaaagttcagcgcagtctgaaacatgaggatattaatctgcaagagattattagcgcagccggtaaagaactgtcagaagcatttaaacagaaaaccagcgaaattctgtcacatgcacatgcagcactggatcagccgctgccgaccaccctgaaaaaacaagaagaaaaagaaatcctgaaaagccagctggatagcctgctgggtctgtatcatctgctggactggtttgcagttgatgaaagcaatgaagttgatccggaatttagcgcacgtctgaccggcattaaactggaaatggaaccgagcctgagcttttataacaaagcccgtaattatgccaccaaaaaaccgtatagcgtcgaaaaattcaaactgaactttcagatgccgaccctggcaagcggttgggatgttaataaagaaaaaaacaacggtgccatcctgttcgtgaaaaatggcctgtattatctgggtattatgccgaaacagaaaggtcgttataaagcgctgagctttgaaccgacggaaaaaaccagtgaaggttttgataaaatgtactacgactattttccggatgcagccaaaatgattccgaaatgtagcacccagctgaaagcagttaccgcacattttcagacccataccaccccgattctgctgagcaataactttattgaaccgctggaaatcaccaaagagatctacgatctgaataacccggaaaaagagccgaaaaaattccagaccgcatatgcaaaaaaaaccggtgatcagaaaggttatcgtgaagcgctgtgtaaatggattgatttcacccgtgattttctgagcaaatacaccaaaaccaccagtatcgatctgagcagcctgcgtccgagcagccagtataaagatctgggcgaatattatgcagaactgaatccgctgctgtatcatattagctttcagcgtattgccgagaaagaaatcatggacgcagttgaaaccggtaaactgtacctgttccagatctacaataaagattttgccaaaggccatcatggcaaaccgaatctgcataccctgtattggaccggtctgtttagccctgaaaatctggcaaaaacctcgattaaactgaatggtcaggcggaactgttttatcgtccgaaaagccgtatgaaacgtatggcacatcgtctgggtgaaaaaatgctgaacaaaaaactgaaagaccagaaaaccccgatcccggatacactgtatcaagaactgtatgattatgtgaaccatcgtctgagccatgatctgagtgatgaagcacgtgccctgctgccgaatgttattaccaaagaagttagccacgagatcattaaagatcgtcgttttaccagcgacaaattcttttttcatgtgccgattaccctgaattatcaggcagcaaatagcccgagcaaatttaaccagcgtgttaatgcatatctgaaagaacatccagaaacgccgattattggtattgatcgtggtgaacgtaacctgatttatatcaccgttattgatagcaccggcaaaatcctggaacagcgtagcctgaataccattcagcagtttgattaccagaaaaaactggataatcgcgagaaagaacgtgttgcagcacgtcaggcatggtcagttgttggtacaattaaagacctgaaacagggttatctgagccaggttattcatgaaattgtggatctgatgattcactatcaggccgttgttgtgctggaaaacctgaattttggctttaaaagcaaacgtaccggcattgcagaaaaagcagtttatcagcagttcgagaaaatgctgattgacaaactgaattgcctggtgctgaaagattatccggctgaaaaagttggtggtgttctgaatccgtatcagctgaccgatcagtttaccagctttgcaaaaatgggcacccagagcggatttctgttttatgttccggcaccgtatacgagcaaaattgatccgctgaccggttttgttgatccgtttgtttggaaaaccatcaaaaaccatgaaagccgcaaacattttctggaaggtttcgattttctgcattacgacgttaaaacgggtgatttcatcctgcactttaaaatgaatcgcaatctgagttttcagcgtggcctgcctggttttatgcctgcatgggatattgtgtttgagaaaaacgaaacacagttcgatgcaaaaggcaccccgtttattgcaggtaaacgtattgttccggtgattgaaaatcatcgtttcaccggtcgttatcgcgatctgtatccggcaaatgaactgatcgcactgctggaagagaaaggtattgtttttcgtgatggctcaaacattctgccgaaactgctggaaaatgatgatagccatgcaattgataccatggttgcactgattcgtagcgttctgcagatgcgtaatagcaatgcagcaaccggtgaagattacattaatagtccggttcgtgatctgaatggtgtttgttttgatagccgttttcagaatccggaatggccgatggatgcagatgcaaatggtgcatatcatattgcactgaaaggacagctgctgctgaaccacctgaaagaaagcaaagatctgaaactgcaaaacggcattagcaatcaggattggctggcatatatccaagaactgcgtaacggtcgtagcagtgatgatgaagcaaccgcagatagccagcatgcagcaccgcctaaaaagaaacgtaaagttggtggtagcggtggttcaggtggtagtggcggtagtggtggctcagggggttctggtggctctggtggtagcctcgagcaccaccaccaccaccac

SEQ ID NO: 489 - DNA, 4089 bp, Artificial Sequence
  SYNTHETIC
atgacccagtttgaaggtttcaccaatctgtatcaggttagcaaaaccctgcgttttgaactgattccgcagggtaaaaccctgaaacatattcaagaacagggcttcatcgaagaggataaagcacgtaacgatcactacaaagaactgaaaccgattatcgaccgcatctataaaacctatgcagatcagtgtctgcagctggttcagctggattgggaaaatctgagcgcagcaattgatagttatcgcaaagaaaaaaccgaagaaacccgtaatgcactgattgaagaacaggcaacctatcgtaatgccatccatgattatttcattggtcgtaccgataatctgaccgatgcaattaacaaacgtcacgccgaaatctataaaggcctgtttaaagccgaactgtttaatggcaaagttctgaaacagctgggcaccgttaccaccaccgaacatgaaaatgcactgctgcgtagctttgataaattcaccacctatttcagcggcttttatgagaatcgcaaaaacgtgtttagcgcagaagatattagcaccgcaattccgcatcgtattgtgcaggataatttcccgaaattcaaagagaactgccacatttttacccgtctgattaccgcagttccgagcctgcgtgaacattttgaaaacgttaaaaaagccatcggcatctttgttagcaccagcattgaagaagtttttagcttcccgttttacaatcagctgctgacccagacccagattgatctgtataaccaactgctgggtggtattagccgtgaagcaggcaccgaaaaaatcaaaggtctgaatgaagtgctgaatctggccattcagaaaaatgatgaaaccgcacatattattgcaagcctgccgcatcgttttattccgctgttcaaacaaattctgagcgatcgtaataccctgagctttattctggaagaattcaaatccgatgaagaggtgattcagagcttttgcaaatacaaaacgctgctgcgcaatgaaaatgttctggaaactgccgaagcactgtttaacgaactgaatagcattgatctgacccacatctttatcagccacaaaaaactggaaaccatttcaagcgcactgtgtgatcattgggataccctgcgtaatgccctgtatgaacgtcgtattagcgaactgaccggtaaaattaccaaaagcgcgaaagaaaaagttcagcgcagtctgaaacatgaggatattaatctgcaagagattattagcgcagccggtaaagaactgtcagaagcatttaaacagaaaaccagcgaaattctgtcacatgcacatgcagcactggatcagccgctgccgaccaccctgaaaaaacaagaagaaaaagaaatcctgaaaagccagctggatagcctgctgggtctgtatcatctgctggactggtttgcagttgatgaaagcaatgaagttgatccggaatttagcgcacgtctgaccggcattaaactggaaatggaaccgagcctgagcttttataacaaagcccgtaattatgccaccaaaaaaccgtatagcgtcgaaaaattcaaactgaactttcagcgtccgaccctggcaagcggttgggatgttaataaagaaaaaaacaacggtgccatcctgttcgtgaaaaatggcctgtattatctgggtattatgccgaaacagaaaggtcgttataaagcgctgagctttgaaccgacggaaaaaaccagtgaaggttttgataaaatgtactacgactattttccggatgcagccaaaatgattccgaaatgtagcacccagctgaaagcagttaccgcacattttcagacccataccaccccgattctgctgagcaataactttattgaaccgctggaaatcaccaaagagatctacgatctgaataacccggaaaaagagccgaaaaaattccagaccgcatatgcaaaaaaaaccggtgatcagaaaggttatcgtgaagcgctgtgtaaatggattgatttcacccgtgattttctgagcaaatacaccaaaaccaccagtatcgatctgagcagcctgcgtccgagcagccagtataaagatctgggcgaatattatgcagaactgaatccgctgctgtatcatattagctttcagcgtattgccgagaaagaaatcatggacgcagttgaaaccggtaaactgtacctgttccagatctacaataaagattttgccaaaggccatcatggcaaaccgaatctgcataccctgtattggaccggtctgtttagccctgaaaatctggcaaaaacctcgattaaactgaatggtcaggcggaactgttttatcgtccgaaaagccgtatgaaacgtatggcacatcgtctgggtgaaaaaatgctgaacaaaaaactgaaagaccagaaaaccccgatcccggatacactgtatcaagaactgtatgattatgtgaaccatcgtctgagccatgatctgagtgatgaagcacgtgccctgctgccgaatgttattaccaaagaagttagccacgagatcattaaagatcgtcgttttaccagcgacaaattcctgtttcatgtgccgattaccctgaattatcaggcagcaaatagcccgagcaaatttaaccagcgtgttaatgcatatctgaaagaacatccagaaacgccgattattggtattgatcgtggtgaacgtaacctgatttatatcaccgttattgatagcaccggcaaaatcctggaacagcgtagcctgaataccattcagcagtttgattaccagaaaaaactggataatcgcgagaaagaacgtgttgcagcacgtcaggcatggtcagttgttggtacaattaaagacctgaaacagggttatctgagccaggttattcatgaaattgtggatctgatgattcactatcaggccgttgttgtgctggaaaacctgaattttggctttaaaagcaaacgtaccggcattgcagaaaaagcagtttatcagcagttcgagaaaatgctgattgacaaactgaattgcctggtgctgaaagattatccggctgaaaaagttggtggtgttctgaatccgtatcagctgaccgatcagtttaccagctttgcaaaaatgggcacccagagcggatttctgttttatgttccggcaccgtatacgagcaaaattgatccgctgaccggttttgttgatccgtttgtttggaaaaccatcaaaaaccatgaaagccgcaaacattttctggaaggtttcgattttctgcattacgacgttaaaacgggtgatttcatcctgcactttaaaatgaatcgcaatctgagttttcagcgtggcctgcctggttttatgcctgcatgggatattgtgtttgagaaaaacgaaacacagttcgatgcaaaaggcaccccgtttattgcaggtaaacgtattgttccggtgattgaaaatcatcgtttcaccggtcgttatcgcgatctgtatccggcaaatgaactgatcgcactgctggaagagaaaggtattgtttttcgtgatggctcaaacattctgccgaaactgctggaaaatgatgatagccatgcaattgataccatggttgcactgattcgtagcgttctgcagatgcgtaatagcaatgcagcaaccggtgaagattacattaatagtccggttcgtgatctgaatggtgtttgttttgatagccgttttcagaatccggaatggccgatggatgcagatgcaaatggtgcatatcatattgcactgaaaggacagctgctgctgaaccacctgaaagaaagcaaagatctgaaactgcaaaacggcattagcaatcaggattggctggcatatatccaagaactgcgtaacggtcgtagcagtgatgatgaagcaaccgcagatagccagcatgcagcaccgcctaaaaagaaacgtaaagttggtggtagcggtggttcaggtggtagtggcggtagtggtggctcagggggttctggtggctctggtggtagcctcgagcaccaccaccaccaccac

SEQ ID NO: 490 - DNA, 4089 bp, Artificial Sequence; identical to SEQ ID NO: 488
  SYNTHETIC

SEQ ID NO: 491 - DNA, 4089 bp, Artificial Sequence; identical to SEQ ID NO: 489
  SYNTHETIC

SEQ ID NO: 492 - protein, 1363 aa, Artificial Sequence; identical to SEQ ID NO: 23
  SYNTHETIC

SEQ ID NO: 493 - protein, 1363 aa, Artificial Sequence
  SYNTHETIC
MTQFEGFTNLYQVSKTLRFELIPQGKTLKHIQEQGFIEEDKARNDHYKELKPIIDRIYKTYADQCLQLVQLDWENLSAAIDSYRKEKTEETRNALIEEQATYRNAIHDYFIGRTDNLTDAINKRHAEIYKGLFKAELFNGKVLKQLGTVTTTEHENALLRSFDKFTTYFSGFYENRKNVFSAEDISTAIPHRIVQDNFPKFKENCHIFTRLITAVPSLREHFENVKKAIGIFVSTSIEEVFSFPFYNQLLTQTQIDLYNQLLGGISREAGTEKIKGLNEVLNLAIQKNDETAHIIASLPHRFIPLFKQILSDRNTLSFILEEFKSDEEVIQSFCKYKTLLRNENVLETAEALFNELNSIDLTHIFISHKKLETISSALCDHWDTLRNALYERRISELTGKITKSAKEKVQRSLKHEDINLQEIISAAGKELSEAFKQKTSEILSHAHAALDQPLPTTLKKQEEKEILKSQLDSLLGLYHLLDWFAVDESNEVDPEFSARLTGIKLEMEPSLSFYNKARNYATKKPYSVEKFKLNFQRPTLASGWDVNKEKNNGAILFVKNGLYYLGIMPKQKGRYKALSFEPTEKTSEGFDKMYYDYFPDAAKMIPKCSTQLKAVTAHFQTHTTPILLSNNFIEPLEITKEIYDLNNPEKEPKKFQTAYAKKTGDQKGYREALCKWIDFTRDFLSKYTKTTSIDLSSLRPSSQYKDLGEYYAELNPLLYHISFQRIAEKEIMDAVETGKLYLFQIYNKDFAKGHHGKPNLHTLYWTGLFSPENLAKTSIKLNGQAELFYRPKSRMKRMAHRLGEKMLNKKLKDQKTPIPDTLYQELYDYVNHRLSHDLSDEARALLPNVITKEVSHEIIKDRRFTSDKFLFHVPITLNYQAANSPSKFNQRVNAYLKEHPETPIIGIDRGERNLIYITVIDSTGKILEQRSLNTIQQFDYQKKLDNREKERVAARQAWSVVGTIKDLKQGYLSQVIHEIVDLMIHYQAVVVLENLNFGFKSKRTGIAEKAVYQQFEKMLIDKLNCLVLKDYPAEKVGGVLNPYQLTDQFTSFAKMGTQSGFLFYVPAPYTSKIDPLTGFVDPFVWKTIKNHESRKHFLEGFDFLHYDVKTGDFILHFKMNRNLSFQRGLPGFMPAWDIVFEKNETQFDAKGTPFIAGKRIVPVIENHRFTGRYRDLYPANELIALLEEKGIVFRDGSNILPKLLENDDSHAIDTMVALIRSVLQMRNSNAATGEDYINSPVRDLNGVCFDSRFQNPEWPMDADANGAYHIALKGQLLLNHLKESKDLKLQNGISNQDWLAYIQELRNGRSSDDEATADSQHAAPPKKKRKVGGSGGSGGSGGSGGSGGSGGSGGSLEHHHHHH

1. A CRISPR-associated protein comprising a polypeptide encoding a variant of AsCpf1, wherein the variant of AsCpf1 is selected from the group consisting of M537R (SEQ ID NO.: 472), F870L (SEQ ID NO.: 473), and M537R/F870L (SEQ ID NO.: 465).

2. The CRISPR-associated protein according to claim 1, wherein the variant of AsCpf1 is M537R (SEQ ID NO.: 472).

3. The CRISPR-associated protein according to claim 1, wherein the variant of AsCpf1 is F870L (SEQ ID NO.: 473).

4. The CRISPR-associated protein according to claim 1, wherein the variant of AsCpf1 is M537R/F870L (SEQ ID NO.: 465).

5. A CRISPR ribonucleoprotein complex, comprising:
a guide RNA; and
a CRISPR-associated protein comprising a polypeptide encoding a variant of AsCpf1, wherein the variant of AsCpf1 is selected from the group consisting of M537R (SEQ ID NO.: 472), F870L (SEQ ID NO.: 473), and M537R/F870L (SEQ ID NO.: 465).

6. The CRISPR ribonucleoprotein complex of claim 5, wherein the variant of AsCpf1 is M537R (SEQ ID NO.: 472).

7. The CRISPR ribonucleoprotein complex of claim 5, wherein the variant of AsCpf1 is F870L (SEQ ID NO.: 473)

8. The CRISPR ribonucleoprotein complex of claim 5, wherein the variant of AsCpf1 is M537R/F870L (SEQ ID NO.: 465).

9. (canceled)

10. (canceled)

11. (canceled)

12. (canceled)

13. (canceled)

14. (canceled)

15. A CRISPR-associated protein comprising a polypeptide encoding a variant of AsCas12a, wherein the variant of AsCas12a is selected from the group consisting of at least one variant amino acid selected from amino acid positions 499-640 and 840-913, provided that the variant AsCas12a provides an improvement in CRISPR/AsCas12a-associated nuclease activity at non-canonical TTTT PAM sites.

16. The CRISPR-associated protein according to claim 15, wherein the variant of AsCas12a is selected from the group consisting of SEQ ID NOs.: 59-245.

17. The CRISPR-associated protein according to claim 16, wherein the variant of AsCas12a further comprises mutations of M537R/F870L (SEQ ID NO.: 465).

18. (canceled)

19. (canceled)

20. (canceled)

21. (canceled)

22. (canceled)

23. (canceled)

24. (canceled)

25. (canceled)

26. (canceled)

27. (canceled)

28. (canceled)

29. (canceled)

30. (canceled)

31. An amino acid sequence encoding a Cas12a polypeptide, comprising one member selected from the group consisting of SEQ ID NOs.: 18-30.

32. (canceled)

33. (canceled)

34. (canceled)

35. (canceled)

36. A CRISPR-associated protein comprising a fusion polypeptide encoding an AsCas12a open reading frame, a nuclear localization signal, optionally an amino acid linker and optionally an affinity tag.

37. The CRISPR-associated protein of claim 36, wherein the AsCas12a open reading frame is selected from the group consisting of SEQ ID NOs.: 59-245.

38. The CRISPR-associated protein of claim 36, wherein the nuclear localization signal is selected from SEQ ID NOs.: 475, 477, 479, 481 and 483.

39. The CRISPR-associated protein of claim 36, wherein the CRISPR-associated protein is encoded by SEQ ID NOs.: 488-491.

40. The CRISPR-associated protein of claim 36, wherein the CRISPR-associated protein is selected from SEQ ID NOs.: 492 and 493.

41. (canceled)
